United States Patent Application Publication US 2024/0318152 A1 - sequence listing, part 2

SEQ ID NO: 1117 - DNA, 3147 bp, synthetic construct
  misc_feature 1..3147: note = variant of P450 oxidase from Bacillus megaterium
  source 1..3147: mol_type = other DNA
atgacaattaaggaaatgcctcagcctaagacgtttggagaacttaaaaatttaccgttattaaatacagataaaccggttcaagctttgatgcgtattgcggatgaattaggagaaatctttaaattcgaggcgcctggtagcgtaacgcgctatttatcaagtcagcgtctaattaaagaagcatgcgatgaatcacgctttgataaaaacttaagtcaagggcttaaatttgcacgtgattttgttggagacgggctggttacaagctggacgcatgaaccgaattggaaaaaagcgcataatatcttagttccaagctttagtcagcatgcaatggggcgttatcatgcgatgatggtcgatatcgccgtgcagcttgttcaaaagtgggagcgtctaaatgcagatgagcatattgaagtatcggaagacatgacacgtttaacgcttgatacaattggtctttgcctgtttaactatcgctttaacagcttttaccgagatacgcctcatccatttattgtgagtgtggttcgtgcactggatgaagtaatgaacaagctgcagcgagcaaatccagacgacccagcttatgatgaaaacaagcgccagtgtcaagaagatatcaaggtgatgaacgactatgtagataaaattattgcagatcgcaaagcaaggggtgaacaaagtcatgatttattaacgcagatgctaaacggaaaagatccagaaacgggtgagccgcttgatgacgggaacattcgtcagcaaattattacattcttaattgcgggacaccaaacgacaagtggtcttttatcatttgcgctgtatttcttagtgaaaaatccacgtgtattacaaaaagtagcagaagaagcagcacgagttctagtagatcctgttccaagctacaaacaagtcaaacagcttaaatatgttggcatggtcttaaacgaagcgctgcgcttatggccagtagcgcctatgttttccctatatgcaaaagaagatacggtgcttggaggagaatatcctttaacgaaaggcgacgaagtaatggttctggtgcctcagcttcaccgtgataaaacaatttggggagacgatgtggaggagttccgtccagagcgttttgaaaatccaagtgcgattccgcagcatgcgtttaaaccgtttggaaacggtcagcgtgcgtgtatcggtcagcagttcgctcttcatagtgcaacgctggtacttggtatgatgctaaaacactttgactttgaagatcatacaaactacgagctcgttattaaagaatcgcggacgttaaaacctgaaggctttgtggtaaaagcaaaatcgaaaggcattccgcttggcggtattccttcacctagcactgaacagtctgctaaaaaagtacgcaggaaggcagaaaacgctcataatacgccgctgcttgtgctatacggttcaaatgcgggaacagctgaaggaacggcgcgtgatttagcagatattgcaatgagcaaaggatttgcaccgcaggtcgcaacgcttgattcacacgccggtaatcttccgcgcgaaggagctgtattaattgtaacggcgtcttataacggtcatccgcctgataacgcaaagcaatttgtcgattggttagaccaagcgtctgcggatgaagtaaaaggcgttcgctactccgtatttggatgcggcgataaaaattgggcggggacgtatcaaaaagtgcctgcttttatcgatgaaacgcttgccgctaaaggggcagaaaacatcgctgaccgcggtgaagcagatgcaagcgacgactttgaaggcgcgtatgaagaatggcgtgatcatatgtggagtgacgtagcagcctactttggtctcgacattgaaaacagtgaagataataaatctactctttcacttcaatttgtcgacagcgcggcggatatgccgcttgcgaaaatgcacggtgcgttttcaacgaacgtcgtagcaagcaaagaacttcaacagcctggcagtgcacgaagcacgcgacatcttgaaattgaacttccaaaagaagcttcttatcaagaaggagatcatttaggtgttattcctcgctattatgaaggaatagtaaaccgtgtaacacagaggttcggcctaagcgcatcacagctgatccgtctggaagcagaagaagaaaaattagctcatttgccactcgctaaaacagtatccgtagaagagcttctgcaatacgtggagcttcaagatcctgttacgcgcacgcagcttcgcgcaatggctgctaaaacggtctgcccgccgcataaagtagagcttgaagccttgcttggcaagcaagcctacaaagaacaagtgctggcaaaacgtttaacaatgcttgaactgcttgaaaaatacccggcgtgtgaaatgagtttcagcgaatttatcgcccttctgccaagcatacgcccgcgctattactcgatttcttcatcacctcgtgtcgatgaaaaacaagcaagcatcacggtcagcgttgtctcaggaccggcgtggagcggatatggagaatataaaggaattgcgtcgaactatcttgctgagctgcaagaaggagatacgattacgtgctttatttccacaccgcagtcagagtttacgctgccaaaagaccctgaaacgccgcttatcatggtcggaccgggaacaggcgtcgcgccgtttagaggctttgtgcaggcgcgcaaacagctaaaagaacaaggacagtcacttggagaagcacatttatacttcggctgccgttcacctcatgaagactatctgtatcaagaagagcttgaaaacgcccaaagcgaaggcatcattacgcttcataccgctttttctcgcatgccgaatcagccgaaaacatacgttcagcacgtaatggaacaagacggcaagaaattgattgaacttcttgatcaaggagcgcacttctatatttgcggagacggaattcaaatggcacctgccgttgaagcaacgcttatgaaaagctatgctgacgttcaccaagtgagtgaagcagacgctcgcttatggctgcagcagctagaagaaaaaggccgatacgcaaaagacgtgtggctgggg

SEQ ID NO: 1118 - protein, 1049 aa, synthetic construct
  REGION 1..1049: note = variant of P450 oxidase from Bacillus megaterium
MTIKEMPQPKTFGELKNLPLLNTDKPVQALMRIADELGEIFKFEAPGSVTRYLSSQRLIKEACDESRFDKNLSQGLKFARDFVGDGLVTSWTHEPNWKKAHNILVPSFSQHAMGRYHAMMVDIAVQLVQKWERLNADEHIEVSEDMTRLTLDTIGLCLFNYRFNSFYRDTPHPFIVSVVRALDEVMNKLQRANPDDPAYDENKRQCQEDIKVMNDYVDKIIADRKARGEQSHDLLTQMLNGKDPETGEPLDDGNIRQQIITFLIAGHQTTSGLLSFALYFLVKNPRVLQKVAEEAARVLVDPVPSYKQVKQLKYVGMVLNEALRLWPVAPMFSLYAKEDTVLGGEYPLTKGDEVMVLVPQLHRDKTIWGDDVEEFRPERFENPSAIPQHAFKPFGNGQRACIGQQFALHSATLVLGMMLKHFDFEDHTNYELVIKESRTLKPEGFVVKAKSKGIPLGGIPSPSTEQSAKKVRRKAENAHNTPLLVLYGSNAGTAEGTARDLADIAMSKGFAPQVATLDSHAGNLPREGAVLIVTASYNGHPPDNAKQFVDWLDQASADEVKGVRYSVFGCGDKNWAGTYQKVPAFIDETLAAKGAENIADRGEADASDDFEGAYEEWRDHMWSDVAAYFGLDIENSEDNKSTLSLQFVDSAADMPLAKMHGAFSTNVVASKELQQPGSARSTRHLEIELPKEASYQEGDHLGVIPRYYEGIVNRVTQRFGLSASQLIRLEAEEEKLAHLPLAKTVSVEELLQYVELQDPVTRTQLRAMAAKTVCPPHKVELEALLGKQAYKEQVLAKRLTMLELLEKYPACEMSFSEFIALLPSIRPRYYSISSSPRVDEKQASITVSVVSGPAWSGYGEYKGIASNYLAELQEGDTITCFISTPQSEFTLPKDPETPLIMVGPGTGVAPFRGFVQARKQLKEQGQSLGEAHLYFGCRSPHEDYLYQEELENAQSEGIITLHTAFSRMPNQPKTYVQHVMEQDGKKLIELLDQGAHFYICGDGIQMAPAVEATLMKSYADVHQVSEADARLWLQQLEEKGRYAKDVWLG

SEQ ID NO: 1119 - DNA, 3147 bp, synthetic construct
  misc_feature 1..3147: note = variant of P450 oxidase from Bacillus megaterium
  source 1..3147: mol_type = other DNA
atgacaattaaggaaatgcctcagcctaagacgtttggagaacttaaaaatttaccgttattaaatacagataaaccggttcaagctttgatgcgtattgcggatgaattaggagaaatctttaaattcgaggcgcctggtagcgtaacgcgctatttatcaagtcagcgtctaattaaagaagcatgcgatgaatcacgctttgataaaaacttaagtcaagggcttaaatttgcacgtgattttgttggagacgggctggttacaagctggacgcatgaaccgaattggaaaaaagcgcataatatcttagttccaagctttagtcagcatgcaatggggcgttatcatgcgatgatggtcgatatcgccgtgcagcttgttcaaaagtgggagcgtctaaatgcagatgagcatattgaagtatcggaagacatgacacgtttaacgcttgatacaattggtctttgcctgtttaactatcgctttaacagcttttaccgagatacgcctcatccatttattgtgagtgtggttcgtgcactggatgaagtaatgaacaagctgcagcgagcaaatccagacgacccagcttatgatgaaaacaagcgccagtgtcaagaagatatcaaggtgatgaacgactatgtagataaaattattgcagatcgcaaagcaaggggtgaacaaagtcatgatttattaacgcagatgctaaacggaaaagatccagaaacgggtgagccgcttgatgacgggaacattcgtcagcaaattattacattcttaattgcgggacaccaaacgacaagtggtcttttatcatttgcgctgtatttcttagtgaaaaatccacgtgtattacaaaaagtagcagaagaagcagcacgagttctagtagatcctgttccaagctacaaacaagtcaaacagcttaaatatgttggcatggtcttaaacgaagcgctgcgcttatggccagtagcgcctatgttttccctatatgcaaaagaagatacggtgcttggaggagaatatcctttaacgaaaggcgacgaagtaatggttctggtgcctcagcttcaccgtgataaaacaatttggggagacgatgtggaggagttccgtccagagcgttttgaaaatccaagtgcgattccgcagcatgcgtttaaaccgtttggaaacggtcagcgtgcgtgtatcggtcagcagttcgctcttcatagtgcaacgctggtacttggtatgatgctaaaacactttgactttgaagatcatacaaactacgagctccgtattaaagaatcgcggacgttaaaacctgaaggctttgtggtaaaagcaaaatcgaaaggcattccgcttggcggtattccttcacctagcactgaacagtctgctaaaaaagtacgcaaaaaggcagaaaacgctcataatacgccgctgcttgtgctatacggttcaaatgcgggaacagctgaaggaacggcgcgtgatttagcagatattgcaatgagcaaaggatttgcaccgcaggtcgcaacgcttgattcacacgccggtaatcttccgcgcgaaggagctgtattaattgtaacggcgtcttataacggtcatccgcctgataacgcaaagcaatttgtcgattggttagaccaagcgtctgcggatgaagtaaaaggcgttcgctactccgtatttggatgcggcgataaaaattgggcggggacgtatcaaaaagtgcctgcttttatcgatgaaacgcttgccgctaaaggggcagaaaacatcgctgaccgcggtgaagcagatgcaagcgacgactttgaaggcgcgtatgaagaatggcgtgatcatatgtggagtgacgtagcagcctactttggtctcgacattgaaaacagtgaagataataaatctactctttcacttcaatttgtcgacagcgcggcggatatgccgcttgcgaaaatgcacggtgcgttttcaacgaacgtcgtagcaagcaaagaacttcaacagcctggcagtgcacgaagcacgcgacatcttgaaattgaacttccaaaagaagcttcttatcaagaaggagatcatttaggtgttattcctcgctattatgaaggaatagtaaaccgtgtaacacagaggttcggcctaagcgcatcacagctgatccgtctggaagcagaagaagaaaaattagctcatttgccactcgctaaaacagtatccgtagaagagcttctgcaatacgtggagcttcaagatcctgttacgcgcacgcagcttcgcgcaatggctgctaaaacggtctgcccgccgcataaagtagagcttgaagccttgcttggcaagcaagcctacaaagaacaagtgctggcaaaacgtttaacaatgcttgaactgcttgaaaaatacccggcgtgtgaaatgagtttcagcgaatttatcgcccttctgccaagcatacgcccgcgctattactcgatttcttcatcacctcgtgtcgatgaaaaacaagcaagcatcacggtcagcgttgtctcaggaccggcgtggagcggatatggagaatataaaggaattgcgtcgaactatcttgctgagctgcaagaaggagatacgattacgtgctttatttccacaccgcagtcagagtttacgctgccaaaagaccctgaaacgccgcttatcatggtcggaccgggaacaggcgtcgcgccgtttagaggctttgtgcaggcgcgcaaacagctaaaagaacaaggacagtcacttggagaagcacatttatacttcggctgccgttcacctcatgaagactatctgtatcaagaagagcttgaaaacgcccaaagcgaaggcatcattacgcttcataccgctttttctcgcatgccgaatcagccgaaaacatacgttcagcacgtaatggaacaagacggcaagaaattgattgaacttcttgatcaaggagcgcacttctatatttgcggagacggaattcaaatggcacctgccgttgaagcaacgcttatgaaaagctatgctgacgttcaccaagtgagtgaagcagacgctcgcttatggctgcagcagctagaagaaaaaggccgatacgcaaaagacgtgtggctgggg

SEQ ID NO: 1120 - protein, 1049 aa, synthetic construct
  REGION 1..1049: note = variant of P450 oxidase from Bacillus megaterium
MTIKEMPQPKTFGELKNLPLLNTDKPVQALMRIADELGEIFKFEAPGSVTRYLSSQRLIKEACDESRFDKNLSQGLKFARDFVGDGLVTSWTHEPNWKKAHNILVPSFSQHAMGRYHAMMVDIAVQLVQKWERLNADEHIEVSEDMTRLTLDTIGLCLFNYRFNSFYRDTPHPFIVSVVRALDEVMNKLQRANPDDPAYDENKRQCQEDIKVMNDYVDKIIADRKARGEQSHDLLTQMLNGKDPETGEPLDDGNIRQQIITFLIAGHQTTSGLLSFALYFLVKNPRVLQKVAEEAARVLVDPVPSYKQVKQLKYVGMVLNEALRLWPVAPMFSLYAKEDTVLGGEYPLTKGDEVMVLVPQLHRDKTIWGDDVEEFRPERFENPSAIPQHAFKPFGNGQRACIGQQFALHSATLVLGMMLKHFDFEDHTNYELRIKESRTLKPEGFVVKAKSKGIPLGGIPSPSTEQSAKKVRKKAENAHNTPLLVLYGSNAGTAEGTARDLADIAMSKGFAPQVATLDSHAGNLPREGAVLIVTASYNGHPPDNAKQFVDWLDQASADEVKGVRYSVFGCGDKNWAGTYQKVPAFIDETLAAKGAENIADRGEADASDDFEGAYEEWRDHMWSDVAAYFGLDIENSEDNKSTLSLQFVDSAADMPLAKMHGAFSTNVVASKELQQPGSARSTRHLEIELPKEASYQEGDHLGVIPRYYEGIVNRVTQRFGLSASQLIRLEAEEEKLAHLPLAKTVSVEELLQYVELQDPVTRTQLRAMAAKTVCPPHKVELEALLGKQAYKEQVLAKRLTMLELLEKYPACEMSFSEFIALLPSIRPRYYSISSSPRVDEKQASITVSVVSGPAWSGYGEYKGIASNYLAELQEGDTITCFISTPQSEFTLPKDPETPLIMVGPGTGVAPFRGFVQARKQLKEQGQSLGEAHLYFGCRSPHEDYLYQEELENAQSEGIITLHTAFSRMPNQPKTYVQHVMEQDGKKLIELLDQGAHFYICGDGIQMAPAVEATLMKSYADVHQVSEADARLWLQQLEEKGRYAKDVWLG

SEQ ID NO: 1121 - DNA, 3147 bp, synthetic construct
  misc_feature 1..3147: note = variant of P450 oxidase from Bacillus megaterium
  source 1..3147: mol_type = other DNA
atgacaattaaggaaatgcctcagcctaagacgtttggagaacttaaaaatttaccgttattaaatacagataaaccggttcaagctttgatgcgtattgcggatgaattaggagaaatctttaaattcgaggcgcctggtagcgtaacgcgctatttatcaagtcagcgtctaattaaagaagcatgcgatgaatcacgctttgataaaaacttaagtcaagggcttaaatttgcacgtgattttgttggagacgggctggttacaagctggacgcatgaaccgaattggaaaaaagcgcataatatcttagttccaagctttagtctgcatgcaatgcaacgttatcatgcgatgatggtcgatatcgccgtgcagcttgttcaaaagtgggagcgtctaaatgcagatgagcatattgaagtatcggaagacatgacacgtttaacgcttgatacaattggtctttgcctgtttaactatcgctttaacagcttttaccgagatacgcctcatccatttattgtgagtgtggttcgtgcactggatgaagtaatgaacaagctgcagcgagcaaatccagacgacccagcttatgatgaaaacaagcgccagtgtcaagaagatatcaaggtgatgaacgactatgtagataaaattattgcagatcgcaaagcaaggggtgaacaaagtcatgatttattaacgcagatgctaaacggaaaagatccagaaacgggtgagccgcttgatgacgggaacattcgtcagcaaattattacattcttaattgcgggacaccaaacgacaagtggtcttttatcatttgcgctgtatttcttagtgaaaaatccacgtgtattacaaaaagtagcagaagaagcagcacgagttctagtagatcctgttccaagctacaaacaagtcaaacagcttaaatatgttggcatggtcttaaacgaagcgctgcgcttatggccagtagcgcctatgttttccctatatgcaaaagaagatacggtgcttggaggagaatatcctttaacgaaaggcgacgaagtaatggttctggtgcctcagcttcaccgtgataaaacaatttggggagacgatgtggaggagttccgtccagagcgttttgaaaatccaagtgcgattccgcagcatgcgtttaaaccgtttggaaacggtcagcgtgcgtgtatcggtcagcagttcgctcttcatagtgcaacgctggtacttggtatgatgctaaaacactttgactttgaagatcatacaaactacgagctcgttattaaagaatcgcggacgttaaaacctgaaggctttgtggtaaaagcaaaatcgaaaggcattccgcttggcggtattccttcacctagcactgaacagtctgctaaaaaagtacgcaaaaaggcagaaaacgctcataatacgccgctgcttgtgctatacggttcaaatgcgggaacagctgaaggaacggcgcgtgatttagcagatattgcaatgagcaaaggatttgcaccgcaggtcgcaacgcttgattcacacgccggtaatcttccgcgcgaaggagctgtattaattgtaacggcgtcttataacggtcatccgcctgataacgcaaagcaatttgtcgattggttagaccaagcgtctgcggatgaagtaaaaggcgttcgctactccgtatttggatgcggcgataaaaattgggcggggacgtatcaaaaagtgcctgcttttatcgatgaaacgcttgccgctaaaggggcagaaaacatcgctaagcgcggtgaagcagatgcaagcgacgactttgaaggcgcgtatgaagaatggcgtgatcatatgtggagtgacgtagcagcctactttggtctcgacattgaaaacagtgaagataataaatctactctttcacttcaatttgtcgacagcgcggcggatatgcctcttgcgaaaatgcacggtgcgttttcaacgaacgtcgtagcaagcaaagaacttcaacagcctggcagtgcacgaagcacgcgacatcttgaaattgaacttccaaaagaagcttcttatcaagaaggagatcatttaggtgttattcctcgctattatgaaggaatagtaaaccgtgtaacacagaggttcggcctaagcgcatcacagctgatccgtctggaagcagaagaagaaaaattagctcatttgccactcgctaaaacagtatccgtagaagagcttctgcaatacgtggagcttcaagatcctgttacgcgcacgcagcttcgcgcaatggctgctaaaacggtctgcccgccgcataaagtagagcttgaagccttgcttggcaagcaagcctacaaagaacaagtgctggcaaaacgtttaacaatgcttgaactgcttgaaaaatacccggcgtgtgaaatgagtttcagcgaatttatcgcccttctgccaagcatacgcccgcgctattactcgatttcttcatcacctcgtgtcgatctgaaacaagcaagcatcacggtcagcgttgtcagcggaccggcgtggagcggatatggagaatataaaggaattgcgtcgaactatcttgctgagctgcaagaaggagatacgattacgtgctttatttccacaccgcagtcagagtttacgctgccaaaagaccctgaaacgccgcttatcatggtcggaccgggaacaggcgtcgcgccgtttagaggctttgtgcaggcgcgcaaacagctaaaagaacaaggacagtcacttggagaagcacatttatacttcggctgccgttcacctcatgaagactatctgtatcaagaagagcttgaaaacgcccaaagcgaaggcatcattctgcttcataccgctttttctcgcatgccgaatcagccgaaaacatacgttcagcacgtaatggaacaagacggcaagaaattgattgaacttcttgatcaaggagcgcacttctatatttgcggagacggaattcaaatggcacctgccgttgaagcaacgcttatgaaaagctatgctgacgttcaccaagtgagtgaagcagacgctcgcttatggctgcagcagctagaagaaaaaggccgatacgcaaaagacgtgtggctgggg

SEQ ID NO: 1122 - protein, 1049 aa, synthetic construct
  REGION 1..1049: note = variant of P450 oxidase from Bacillus megaterium
MTIKEMPQPKTFGELKNLPLLNTDKPVQALMRIADELGEIFKFEAPGSVTRYLSSQRLIKEACDESRFDKNLSQGLKFARDFVGDGLVTSWTHEPNWKKAHNILVPSFSLHAMQRYHAMMVDIAVQLVQKWERLNADEHIEVSEDMTRLTLDTIGLCLFNYRFNSFYRDTPHPFIVSVVRALDEVMNKLQRANPDDPAYDENKRQCQEDIKVMNDYVDKIIADRKARGEQSHDLLTQMLNGKDPETGEPLDDGNIRQQIITFLIAGHQTTSGLLSFALYFLVKNPRVLQKVAEEAARVLVDPVPSYKQVKQLKYVGMVLNEALRLWPVAPMFSLYAKEDTVLGGEYPLTKGDEVMVLVPQLHRDKTIWGDDVEEFRPERFENPSAIPQHAFKPFGNGQRACIGQQFALHSATLVLGMMLKHFDFEDHTNYELVIKESRTLKPEGFVVKAKSKGIPLGGIPSPSTEQSAKKVRKKAENAHNTPLLVLYGSNAGTAEGTARDLADIAMSKGFAPQVATLDSHAGNLPREGAVLIVTASYNGHPPDNAKQFVDWLDQASADEVKGVRYSVFGCGDKNWAGTYQKVPAFIDETLAAKGAENIAKRGEADASDDFEGAYEEWRDHMWSDVAAYFGLDIENSEDNKSTLSLQFVDSAADMPLAKMHGAFSTNVVASKELQQPGSARSTRHLEIELPKEASYQEGDHLGVIPRYYEGIVNRVTQRFGLSASQLIRLEAEEEKLAHLPLAKTVSVEELLQYVELQDPVTRTQLRAMAAKTVCPPHKVELEALLGKQAYKEQVLAKRLTMLELLEKYPACEMSFSEFIALLPSIRPRYYSISSSPRVDLKQASITVSVVSGPAWSGYGEYKGIASNYLAELQEGDTITCFISTPQSEFTLPKDPETPLIMVGPGTGVAPFRGFVQARKQLKEQGQSLGEAHLYFGCRSPHEDYLYQEELENAQSEGIILLHTAFSRMPNQPKTYVQHVMEQDGKKLIELLDQGAHFYICGDGIQMAPAVEATLMKSYADVHQVSEADARLWLQQLEEKGRYAKDVWLG

SEQ ID NO: 1123 - DNA, 3147 bp, synthetic construct
  misc_feature 1..3147: note = variant of P450 oxidase from Bacillus megaterium
  source 1..3147: mol_type = other DNA
atgacaattaaggaaatgcctcagcctaagacgtttggagaacttaaaaatttaccgttattaaatacagataaaccggttcaagctttgatgcgtattgcggatgaattaggagaaatctttaaattcgaggcgcctggtagcgtaacgcgctatttatcaagtcagcgtctaattaaagaagcatgcgatgaatcacgctttgataaaaacttaagtcaagggcttaaatttgcacgtgattttgttggagacgggctggttacaagctggacgcatgaaccgaattggaaaaaagcgcataacatcttagttccaagctttagtcagcatgcaatggggcgttatcatgcgatgatggtcgatatcgccgtgcagcttgttcaaaagtgggagcgtctaaatgcagatgagcatattgaagtatcggaagacatgacacgtttaacgcttgatacaattggtctttgcctgtttaactatcgctttaacagcttttaccgagatacgcctcatccatttattgtgagtgtggttcgtgcactggatgaagtaatgaacaagctgcagcgagcaaatccagacgacccagcttatgatgaaaacaagcgccagtgccaagaagatatcaaggtgatgaacgactatgtagataaaattattgcagatcgcaaagcaaggggtgaacaaagtcatgatttattaacgcagatgctaaacggaaaagatccagtaacgggtgagccgcttgatgacgggaacattcgtcagcaaattattacattcttaattgcgggacaccaaacgacaagtggtcttttatcatttgcgctgtatttcttagtgaaaaatccacgtgtattacaaaaagtagcagaagaagcagcacgagttctagtagatcctgttccaagctacaaacaagtcaaacagcttaaatatgttggcatggtcttaaacgaagcgctgcgcttatggccagtagcgcctatgttttccctatatgcaaaagaagatacggtgcttggaggagaatatcctttaacgaaaggcgacgaagtaatggttctggtgcctcagcttcaccgtgataaaacaatttggggagacgatgtggaggagttccgtccagagcgttttgaaaatccaagtgcgattccgcagcatgcgtttaaaccgtttggaaacggtcagcgtgcgtgtatcggtcagcagttcgctcttcatagtgcaacgctggtacttggtatgatgctaaaacactttgactttgaagatcatacaaactacgagctcgttattaaagaatcgcggacgttaaaacctgaaggctttgtggtaaaagcaaaatcgaaaggcattccgcttggcggtattccttcacctagcactgaacagtctgctaaaaaagtacgcaaaaaggcagaaaacgctcataatacgccgctgcttgtgctatacggttcaaatgcgggaacagctgaaggaacggcgcgtgatttagcagatattgcaatgagcaaaggatttgcaccgcaggtcgcaacgcttgattcacacgccggtaatcttccgcgcgaaggagctgtattaattgtaacggcgtcttataacggtcatccgcctgataacgcaaagcaatttgtcgattggttagaccaagcgtctgcggatgaagtaaaaggcgttcgctactccgtatttggatgcggcgataaaaattgggcggggacgtatcaaaaagtgcctgcttttatcgatgaaacgcttgccgctaaaggggcagaaaacatcgctaagcgcggtgaagcagatgcaagcgacgactttgaaggcgcgtatgaagaatggcgtgatcatatgtggagtgacgtagcagcctactttggtctcgacattgaaaacagtgaagataataaatctactctttcacttcaatttgtcgacagcgcggcggatatgcctcttgcgaaaatgcacggtgcgttttcaacgaacgtcgtagcaagcaaagaacttcaacagcctggcagtgcacgaagcacgcgacatcttgaaattgaacttccaaaagaagcttcttatcaagaaggagatcatttaggtgttattcctcgctattatgaaggaatagtaaaccgtgtaacacagaggttcggcctaagcgcatcacagctgatccgtctggaagcagaagaagaaaaattagctcatttgccactcgctaaaacagtatccgtagaagagcttctgcaatacgtggagcttcaagatcctgttacgcgcacgcagcttcgcgcaatggctgctaaaacggtctgcccgccgcataaagtagagcttgaagccttgcttggcaagcaagcctacaaagaacaagtgctggcaaaacgtttaacaatgcttgaactgcttgaaaaatacccggcgtgtgaaatgagtttcagcgaatttatcgcccttctgccaagcatacgcccgcgctattactcgatttcttcatcacctcgtgtcgatctgaaacaagcaagcatcacggtcagcgttgtcagcggaccggcgtggagcggatatggagaatataaaggaattgcgtcgaactatcttgctgagctgcaagaaggagatacgattacgtgctttatttccacaccgcagtcagagtttacgctgccaaaagaccctgaaacgccgcttatcatggtcggaccgggaacaggcgtcgcgccgtttagaggctttgtgcaggcgcgcaaacagctaaaagaacaaggacagtcacttggagaagcacatttatacttcggctgccgttcacctcatgaagactatctgtatcaagaagagcttgaaaacgcccaaagcgaaggcatcattctgcttcataccgctttttctcgcatgccgaatcagccgaaaacatacgttcagcacgtaatggaacaagacggcaagaaattgattgaacttcttgatcaaggagcgcacttctatatttgcggagacggaattcaaatggcacctgccgttgaagcaacgcttatgaaaagctatgctgacgttcaccaagtgagtgaagcagacgctcgcttatggctgcagcagctagaagaaaaaggccgatacgcaaaagacgtgtggctgggg

SEQ ID NO: 1124 - protein, 1049 aa, synthetic construct
  REGION 1..1049: note = variant of P450 oxidase from Bacillus megaterium
MTIKEMPQPKTFGELKNLPLLNTDKPVQALMRIADELGEIFKFEAPGSVTRYLSSQRLIKEACDESRFDKNLSQGLKFARDFVGDGLVTSWTHEPNWKKAHNILVPSFSQHAMGRYHAMMVDIAVQLVQKWERLNADEHIEVSEDMTRLTLDTIGLCLFNYRFNSFYRDTPHPFIVSVVRALDEVMNKLQRANPDDPAYDENKRQCQEDIKVMNDYVDKIIADRKARGEQSHDLLTQMLNGKDPVTGEPLDDGNIRQQIITFLIAGHQTTSGLLSFALYFLVKNPRVLQKVAEEAARVLVDPVPSYKQVKQLKYVGMVLNEALRLWPVAPMFSLYAKEDTVLGGEYPLTKGDEVMVLVPQLHRDKTIWGDDVEEFRPERFENPSAIPQHAFKPFGNGQRACIGQQFALHSATLVLGMMLKHFDFEDHTNYELVIKESRTLKPEGFVVKAKSKGIPLGGIPSPSTEQSAKKVRKKAENAHNTPLLVLYGSNAGTAEGTARDLADIAMSKGFAPQVATLDSHAGNLPREGAVLIVTASYNGHPPDNAKQFVDWLDQASADEVKGVRYSVFGCGDKNWAGTYQKVPAFIDETLAAKGAENIAKRGEADASDDFEGAYEEWRDHMWSDVAAYFGLDIENSEDNKSTLSLQFVDSAADMPLAKMHGAFSTNVVASKELQQPGSARSTRHLEIELPKEASYQEGDHLGVIPRYYEGIVNRVTQRFGLSASQLIRLEAEEEKLAHLPLAKTVSVEELLQYVELQDPVTRTQLRAMAAKTVCPPHKVELEALLGKQAYKEQVLAKRLTMLELLEKYPACEMSFSEFIALLPSIRPRYYSISSSPRVDLKQASITVSVVSGPAWSGYGEYKGIASNYLAELQEGDTITCFISTPQSEFTLPKDPETPLIMVGPGTGVAPFRGFVQARKQLKEQGQSLGEAHLYFGCRSPHEDYLYQEELENAQSEGIILLHTAFSRMPNQPKTYVQHVMEQDGKKLIELLDQGAHFYICGDGIQMAPAVEATLMKSYADVHQVSEADARLWLQQLEEKGRYAKDVWLG

SEQ ID NO: 1125 - DNA, 3147 bp, synthetic construct
  misc_feature 1..3147: note = variant of P450 oxidase from Bacillus megaterium
  source 1..3147: mol_type = other DNA
atgacaattaaggaaatgcctcagcctaagacgtttggagaacttaaaaatttaccgttattaaatacagataaaccggttcaagctttgatgcgtattgcggatgaattaggagaaatctttaaattcgaggcgcctggtagcgtaacgcgctatttatcaagtcagcgtctaattaaagaagcatgcgatgaatcacgctttgataaaaacttaagtcaagggcttaaatttgcacgtgattttgttggagacgggctggttacaagctggacgcatgaaccgaattggaaaaaagcgcataatatcttagttccaagctttagtcagcatgcaatggggcgttatcatgcgatgatggtcgatatcgccgtgcagcttgttcaaaagtgggagcgtctaaatgcagatgagcatattgaagtatcggaagacatgacacgtttaacgcttgatacaattggtctttgcctgtttaactatcgctttaacagcttttaccgagatacgcctcatccatttattgtgagtgtggttcgtgcactggatgaagtaatgaacaagctgcagcgagcaaatccagacgatccagcttatgatgaaaacaagcgccagtgtcaagaagatatcaaggtgatgaacgactatgtagataaaattattgcagatcgcaaagcaaggggtgaacaaagtcatgatttattaacgcgtatgctaaacggaaaagatccagaaacgggtgagccgcttgatgacgggaacattcgtcagcaaattattacattcttaattgcgggacaccaaacgacaagtggtcttttatcatttgcgctgtatttcttagtgaaaaatccacgtgtattacaaaaagtagcagaagaagcagcacgagttctagtagatcctgttccaagctacaaacaagtcaaacagcttaaatatgttggcatggtcttaaacgaagcgctgcgcttatggccagtagcgcctatgttttccctatatgcaaaagaagatacggtgcttggaggagaatatcctttaacgaaaggcgacgaagtaatggttctggtgcctcagcttcaccgtgataaaacaatttggggagacgatgtggaggagttccgtccagagcgttttgaaaatccaagtgcgattccgcagcatgcgtttaaaccgtttggaaacggtcagcgtgcgtgtatcggtcagcagttcgctcttcatagtgcaacgctggtacttggtatgatgctaaaacactttgactttgaagatcatacaaactacgagctcgttattaaagaatcgcggacgttaaaacctgaaggctttgtggtaaaagcaaaatcgaaaggcattccgcttggcggtattccttcacctagcactgaacagtctgctaaaaaagtacgcaaaaaggcagaaaacgctcataatacgccgctgcttgtgctatacggttcaaatgcgggaacagctgaaggaacggcgcgtgatttagcagatattgcaatgagcaaaggatttgcaccgcaggtcgcaacgcttgattcacacgccggtaatcttccgcgcgaaggagctgtattaattgtaacggcgtcttataacggtcatccgcctgataacgcaaagcaatttgtcgattggttagaccaagcgtctgcggatgaagtaaaaggcgttcgctactccgtatttggatgcggcgataaaaattgggcggggacgtatcaaaaagtgcctgcttttatcgatgaaacgcttgccgctaaaggggcagaaaacatcgctaagcgcggtgaagcagatgcaagcgacgactttgaaggcgcgtatgaagaatggcgtgatcatatgtggagtgacgtagcagcctactttggtctcgacattgaaaacagtgaagataataaatctactctttcacttcaatttgtcgacagcgcggcggatatgcctcttgcgaaaatgcacggtgcgttttcaacgaacgtcgtagcaagcaaagaacttcaacagcctggcagtgcacgaagcacgcgacatcttgaaattgaacttccaaaagaagcttcttatcaagaaggagatcatttaggtgttattcctcgctattatgaaggaatagtaaaccgtgtaacacagaggttcggcctaagcgcatcacagctgatccgtctggaagcagaagaagaaaaattagctcatttgccactcgctaaaacagtatccgtagaagagcttctgcaatacgtggagcttcaagatcctgttacgcgcacgcagcttcgcgcaatggctgctaaaacggtctgcccgccgcataaagtagagcttgaagccttgcttggcaagcaagcctacaaagaacaagtgctggcaaaacgtttaacaatgcttgaactgcttgaaaaatacccggcgtgtgaaatgagtttcagcgaatttatcgcccttctgccaagcatacgcccgcgctattactcgatttcttcatcacctcgtgtcgatctgaaacaagcaagcatcacggtcagcgttgtcagcggaccggcgtggagcggatatggagaatataaaggaattgcgtcgaactatcttgctgagctgcaagaaggagatacgattacgtgctttatttccacaccgcagtcagagtttacgctgccaaaagaccctgaaacgccgcttatcatggtcggaccgggaacaggcgtcgcgccgtttagaggctttgtgcaggcgcgcaaacagctaaaagaacaaggacagtcacttggagaagcacatttatacttcggctgccgttcacctcatgaagactatctgtatcaagaagagcttgaaaacgcccaaagcgaaggcatcattctgcttcataccgctttttctcgcatgccgaatcagccgaaaacatacgttcagcacgtaatggaacaagacggcaagaaattgattgaacttcttgatcaaggagcgcacttctatatttgcggagacggaattcaaatggcacctgccgttgaagcaacgcttatgaaaagctatgctgacgttcaccaagtgagtgaagcagacgctcgcttatggctgcagcagctagaagaaaaaggccgatacgcaaaagacgtgtggctgggg

SEQ ID NO: 1126 - protein, 1049 aa, synthetic construct
  REGION 1..1049: note = variant of P450 oxidase from Bacillus megaterium
MTIKEMPQPKTFGELKNLPLLNTDKPVQALMRIADELGEIFKFEAPGSVTRYLSSQRLIKEACDESRFDKNLSQGLKFARDFVGDGLVTSWTHEPNWKKAHNILVPSFSQHAMGRYHAMMVDIAVQLVQKWERLNADEHIEVSEDMTRLTLDTIGLCLFNYRFNSFYRDTPHPFIVSVVRALDEVMNKLQRANPDDPAYDENKRQCQEDIKVMNDYVDKIIADRKARGEQSHDLLTRMLNGKDPETGEPLDDGNIRQQIITFLIAGHQTTSGLLSFALYFLVKNPRVLQKVAEEAARVLVDPVPSYKQVKQLKYVGMVLNEALRLWPVAPMFSLYAKEDTVLGGEYPLTKGDEVMVLVPQLHRDKTIWGDDVEEFRPERFENPSAIPQHAFKPFGNGQRACIGQQFALHSATLVLGMMLKHFDFEDHTNYELVIKESRTLKPEGFVVKAKSKGIPLGGIPSPSTEQSAKKVRKKAENAHNTPLLVLYGSNAGTAEGTARDLADIAMSKGFAPQVATLDSHAGNLPREGAVLIVTASYNGHPPDNAKQFVDWLDQASADEVKGVRYSVFGCGDKNWAGTYQKVPAFIDETLAAKGAENIAKRGEADASDDFEGAYEEWRDHMWSDVAAYFGLDIENSEDNKSTLSLQFVDSAADMPLAKMHGAFSTNVVASKELQQPGSARSTRHLEIELPKEASYQEGDHLGVIPRYYEGIVNRVTQRFGLSASQLIRLEAEEEKLAHLPLAKTVSVEELLQYVELQDPVTRTQLRAMAAKTVCPPHKVELEALLGKQAYKEQVLAKRLTMLELLEKYPACEMSFSEFIALLPSIRPRYYSISSSPRVDLKQASITVSVVSGPAWSGYGEYKGIASNYLAELQEGDTITCFISTPQSEFTLPKDPETPLIMVGPGTGVAPFRGFVQARKQLKEQGQSLGEAHLYFGCRSPHEDYLYQEELENAQSEGIILLHTAFSRMPNQPKTYVQHVMEQDGKKLIELLDQGAHFYICGDGIQMAPAVEATLMKSYADVHQVSEADARLWLQQLEEKGRYAKDVWLG

SEQ ID NO: 1127 - DNA, 3147 bp, synthetic construct
  misc_feature 1..3147: note = variant of P450 oxidase from Bacillus megaterium
  source 1..3147: mol_type = other DNA
atgacaattaaggaaatgcctcagcctaagacgtttggagaacttaaaaatttaccgttattaaatacagataaaccggttcaagctttgatgcgtattgcggatgaattaggagaaatctttaaattcgaggcgcctggtagcgtaacgcgctatttatcaagtcagcgtctaattaaagaagcatgcgatgaatcacgctttgataaaaacttaagtcaagggcttaaatttgcacgtgattttgttggagacgggctggttacaagctggacgcatgaaccgaattggaaaaaagcgcataatatcttagttccaagctttagtcagcatgcaatgcaacgttatcatgcgatgatggtcgatatcgccgtgcagcttgttcaaaagtgggagcgtctaaatgcagatgagcatattgaagtatcggaagacatgacacgtttaacgcttgatacaattggtctttgcctgtttaactatcgctttaacagcttttaccgagatacgcctcatccatttattgtgagtgtggttcgtgcactggatgaagtaatgaacaagctgcagcgagcaaatccagacgatccagcttatgatgaaaacaagcgccagtgtcaagaagatatcaaggtgatgaacgactatgtagataaaattattgcagatcgcaaagcaaggggtgaacaaagtcatgatttattaacgcagatgctaaacggaaaagatccagaaacgggtgagccgcttgatgacgggaacattcgtcagcaaattattacattcttaattgcgggacaccaaacgacaagtggtcttttatcatttgcgctgtatttcttagtgaaaaatccacgtgtattacaaaaagtagcagaagaagcagcacgagttctagtagatcctgttccaagctacaaacaagtcaaacagcttaaatatgttggcatggtcttaaacgaagcgctgcgcttatggccagtagcgcctatgttttccctatatgcaaaagaagatacggtgcttggaggagaatatcctttaacgaaaggcgacgaagtaatggttctggtgcctcagcttcaccgtgataaaacaatttggggagacgatgtggaggagttccgtccagagcgttttgaaaatccaagtgcgattccgcagcatgcgtttaaaccgtttggaaacggtcagcgtgcgtgtatcggtcagcagttcgctcttcatagtgcaacgctggtacttggtatgatgctaaaacactttgactttgaagatcatacaaactacgagctcgttattaaagaatcgcggacgttaaaacctgaaggctttgtggtaaaagcaaaatcgaaaggcattccgcttggcggtattccttcacctagcactgaacagtctgctaaaaaagtacgcaaaaaggcagaaaacgctcataatacgccgctgcttgtgctatacggttcaaatgcgggaacagctgaaggaacggcgcgtgatttagcagatattgcaatgagcaaaggatttgcaccgcaggtcgcaacgcttgattcacacgccggtaatcttccgcgcgaaggagctgtattaattgtaacggcgtcttataacggtcatccgcctgataacgcaaagcaatttgtcgattggttagaccaagcgtctgcggatgaagtaaaaggcgttcgctactccgtatttggatgcggcgataaaaattgggcggggacgtatcaaaaagtgcctgcttttatcgatgaaacgcttgccgctaaaggggcagaaaacatcgctaagcgcggtgaagcagatgcaagcgacgactttgaaggcgcgtatgaagaatggcgtgatcatatgtggagtgacgtagcagcctactttggtctcgacattgaaaacagtgaagataataaatctactctttcacttcaatttgtcgacagcgcggcggatatgcctcttgcgaaaatgcacggtgcgttttcaacgaacgtcgtagcaagcaaagaacttcaacagcctggcagtgcacgaagcacgcgacatcttgaaattgaacttccaaaagaagcttcttatcaagaaggagatcatttaggtgttattcctcgctattatgaaggaatagtaaaccgtgtaacacagaggttcggcctaagcgcatcacagctgatccgtctggaagcagaagaagaaaaattagctcatttgccactcgctaaaacagtatccgtagaagagcttctgcaatacgtggagcttcaagatcctgttacgcgcacgcagcttcgcgcaatggctgctaaaacggtctgcccgccgcataaagtagagcttgaagccttgcttggcaagcaagcctacaaagaacaagtgctggcaaaacgtttaacaatgcttgaactgcttgaaaaatacccggcgtgtgaaatgagtttcagcgaatttatcgcccttctgccaagcatacgcccgcgctattactcgatttcttcatcacctcgtgtcgatctgaaacaagcaagcatcacggtcagcgttgtcagcggaccggcgtggagcggatatggagaatataaaggaattgcgtcgaactatcttgctgagctgcaagaaggagatacgattacgtgctttatttccacaccgcagtcagagtttacgctgccaaaagaccctgaaacgccgcttatcatggtcggaccgggaacaggcgtcgcgccgtttagaggctttgtgcaggcgcgcaaacagctaaaagaacaaggacagtcacttggagaagcacatttatacttcggctgccgttcacctcatgaagactatctgtatcaagaagagcttgaaaacgcccaaagcgaaggcatcattctgcttcataccgctttttctcgcatgccgaatcagccgaaaacatacgttcagcacgtaatggaacaagacggcaagaaattgattgaacttcttgatcaaggagcgcacttctatatttgcggagacggaattcaaatggcacctgccgttgaagcaacgcttatgaaaagctatgctgacgttcaccaagtgagtgaagcagacgctcgcttatggctgcagcagctagaagaaaaaggccgatacgcaaaagacgtgtggctgggg

SEQ ID NO: 1128 - protein, 1049 aa, synthetic construct
  REGION 1..1049: note = variant of P450 oxidase from Bacillus megaterium
MTIKEMPQPKTFGELKNLPLLNTDKPVQALMRIADELGEIFKFEAPGSVTRYLSSQRLIKEACDESRFDKNLSQGLKFARDFVGDGLVTSWTHEPNWKKAHNILVPSFSQHAMQRYHAMMVDIAVQLVQKWERLNADEHIEVSEDMTRLTLDTIGLCLFNYRFNSFYRDTPHPFIVSVVRALDEVMNKLQRANPDDPAYDENKRQCQEDIKVMNDYVDKIIADRKARGEQSHDLLTQMLNGKDPETGEPLDDGNIRQQIITFLIAGHQTTSGLLSFALYFLVKNPRVLQKVAEEAARVLVDPVPSYKQVKQLKYVGMVLNEALRLWPVAPMFSLYAKEDTVLGGEYPLTKGDEVMVLVPQLHRDKTIWGDDVEEFRPERFENPSAIPQHAFKPFGNGQRACIGQQFALHSATLVLGMMLKHFDFEDHTNYELVIKESRTLKPEGFVVKAKSKGIPLGGIPSPSTEQSAKKVRKKAENAHNTPLLVLYGSNAGTAEGTARDLADIAMSKGFAPQVATLDSHAGNLPREGAVLIVTASYNGHPPDNAKQFVDWLDQASADEVKGVRYSVFGCGDKNWAGTYQKVPAFIDETLAAKGAENIAKRGEADASDDFEGAYEEWRDHMWSDVAAYFGLDIENSEDNKSTLSLQFVDSAADMPLAKMHGAFSTNVVASKELQQPGSARSTRHLEIELPKEASYQEGDHLGVIPRYYEGIVNRVTQRFGLSASQLIRLEAEEEKLAHLPLAKTVSVEELLQYVELQDPVTRTQLRAMAAKTVCPPHKVELEALLGKQAYKEQVLAKRLTMLELLEKYPACEMSFSEFIALLPSIRPRYYSISSSPRVDLKQASITVSVVSGPAWSGYGEYKGIASNYLAELQEGDTITCFISTPQSEFTLPKDPETPLIMVGPGTGVAPFRGFVQARKQLKEQGQSLGEAHLYFGCRSPHEDYLYQEELENAQSEGIILLHTAFSRMPNQPKTYVQHVMEQDGKKLIELLDQGAHFYICGDGIQMAPAVEATLMKSYADVHQVSEADARLWLQQLEEKGRYAKDVWLG

SEQ ID NO: 1129 - DNA, 3147 bp, synthetic construct
  misc_feature 1..3147: note = variant of P450 oxidase from Bacillus megaterium
  source 1..3147: mol_type = other DNA
atgacaattaaggaaatgcctcagcctaagacgtttggagaacttaaaaatttaccgttattaaatacagataaaccggttcaagctttgatgcgtattgcggatgaattaggagaaatctttaaattcgaggcgcctggtagcgtaacgcgctatttatcaagtcagcgtctaattaaagaagcatgcgatgaatcacgctttgataaaaacttaagtcaagggcttaaatttgcacgtgattttgttggagacgggctggttacaagctggacgcatgaaccgaattggaaaaaagcgcataatatcttagttccaagctttagtcagcatgcaatggggcgttatcatgcgatgatggtcgatatcgccgtgcagcttgttcaaaagtgggagcgtctaaatgcagatgagcatattgaagtatcggaagacatgacacgtttaacgcttgatacaattggtctttgcctgtttaactatcgctttaacagcttttaccgagatacgcctcatccatttattgtgagtgtggttcgtgcactggatgaagtaatgaacaagctgcagcgagcaaatccagacgatccagcttatgatgaaaacaagcgccagtgtcaagaagatatcaaggtgatgaacgactatgtagataaaattattgcagatcgcaaagcaaggggtgaacaaagtcatgatttattaacgcagatgctaaacggaaaagatccaagcacgggtgagccgcttgatgacgggaacattcgtcagcaaattattacattcttaattgcgggacaccaaacgacaagtggtcttttatcatttgcgctgtatttcttagtgaaaaatccacgtgtattacaaaaagtagcagaagaagcagcacgagttctagtagatcctgttccaagctacaaacaagtcaaacagcttaaatatgttggcatggtcttaaacgaagcgctgcgcttatggccagtagcgcctatgttttccctatatgcaaaagaagatacggtgcttggaggagaatatcctttaacgaaaggcgacgaagtaatggttctggtgcctcagcttcaccgtgataaaacaatttggggagacgatgtggaggagttccgtccagagcgttttgaaaatccaagtgcgattccgcagcatgcgtttaaaccgtttggaaacggtcagcgtgcgtgtatcggtcagcagttcgctcttcatagtgcaacgctggtacttggtatgatgctaaaacactttgactttgaagatcatacaaactacgagctcgttattaaagaatcgcggacgttaaaacctgaaggctttgtggtaaaagcaaaatcgaaaggcattccgcttggcggtattccttcacctagcactgaacagtctgctaaaaaagtacgcaaaaaggcagaaaacgctcataatacgccgctgcttgtgctatacggttcaaatgcgggaacagctgaaggaacggcgcgtgatttagcagatattgcaatgagcaaaggatttgcaccgcaggtcgcaacgcttgattcacacgccggtaatcttccgcgcgaaggagctgtattaattgtaacggcgtcttataacggtcatccgcctgataacgcaaagcaatttgtcgattggttagaccaagcgtctgcggatgaagtaaaaggcgttcgctactccgtatttggatgcggcgataaaaattgggcggggacgtatcaaaaagtgcctgcttttatcgatgaaacgcttgccgctaaaggggcagaaaacatcgctaagcgcggtgaagcagatgcaagcgacgactttgaaggcgcgtatgaagaatggcgtgatcatatgtggagtgacgtagcagcctactttggtctcgacattgaaaacagtgaagataataaatctactctttcacttcaatttgtcgacagcgcggcggatatgcctcttgcgaaaatgcacggtgcgttttcaacgaacgtcgtagcaagcaaagaacttcaacagcctggcagtgcacgaagcacgcgacatcttgaaattgaacttccaaaagaagcttcttatcaagaaggagatcatttaggtgttattcctcgctattatgaaggaatagtaaaccgtgtaacacagaggttcggcctaagcgcatcacagctgatccgtctggaagcagaagaagaaaaattagctcatttgccactcgctaaaacagtatccgtagaagagcttctgcaatacgtggagcttcaagatcctgttacgcgcacgcagcttcgcgcaatggctgctaaaacggtctgcccgccgcataaagtagagcttgaagccttgcttggcaagcaagcctacaaagaacaagtgctggcaaaacgtttaacaatgcttgaactgcttgaaaaatacccggcgtgtgaaatgagtttcagcgaatttatcgcccttctgccaagcatacgcccgcgctattactcgatttcttcatcacctcgtgtcgatctgaaacaagcaagcatcacggtcagcgttgtcagcggaccggcgtggagcggatatggagaatataaaggaattgcgtcgaactatcttgctgagctgcaagaaggagatacgattacgtgctttatttccacaccgcagtcagagtttacgctgccaaaagaccctgaaacgccgcttatcatggtcggaccgggaacaggcgtcgcgccgtttagaggctttgtgcaggcgcgcaaacagctaaaagaacaaggacagtcacttggagaagcacatttatacttcggctgccgttcacctcatgaagactatctgtatcaagaagagcttgaaaacgcccaaagcgaaggcatcattctgcttcataccgctttttctcgcatgccgaatcagccgaaaacatacgttcagcacgtaatggaacaagacggcaagaaattgattgaacttcttgatcaaggagcgcacttctatatttgcggagacggaattcaaatggcacctgccgttgaagcaacgcttatgaaaagctatgctgacgttcaccaagtgagtgaagcagacgctcgcttatggctgcagcagctagaagaaaaaggccgatacgcaaaagacgtgtggctgggg

SEQ ID NO: 1130 - protein, 1049 aa, synthetic construct
  REGION 1..1049: note = variant of P450 oxidase from Bacillus megaterium
MTIKEMPQPKTFGELKNLPLLNTDKPVQALMRIADELGEIFKFEAPGSVTRYLSSQRLIKEACDESRFDKNLSQGLKFARDFVGDGLVTSWTHEPNWKKAHNILVPSFSQHAMGRYHAMMVDIAVQLVQKWERLNADEHIEVSEDMTRLTLDTIGLCLFNYRFNSFYRDTPHPFIVSVVRALDEVMNKLQRANPDDPAYDENKRQCQEDIKVMNDYVDKIIADRKARGEQSHDLLTQMLNGKDPSTGEPLDDGNIRQQIITFLIAGHQTTSGLLSFALYFLVKNPRVLQKVAEEAARVLVDPVPSYKQVKQLKYVGMVLNEALRLWPVAPMFSLYAKEDTVLGGEYPLTKGDEVMVLVPQLHRDKTIWGDDVEEFRPERFENPSAIPQHAFKPFGNGQRACIGQQFALHSATLVLGMMLKHFDFEDHTNYELVIKESRTLKPEGFVVKAKSKGIPLGGIPSPSTEQSAKKVRKKAENAHNTPLLVLYGSNAGTAEGTARDLADIAMSKGFAPQVATLDSHAGNLPREGAVLIVTASYNGHPPDNAKQFVDWLDQASADEVKGVRYSVFGCGDKNWAGTYQKVPAFIDETLAAKGAENIAKRGEADASDDFEGAYEEWRDHMWSDVAAYFGLDIENSEDNKSTLSLQFVDSAADMPLAKMHGAFSTNVVASKELQQPGSARSTRHLEIELPKEASYQEGDHLGVIPRYYEGIVNRVTQRFGLSASQLIRLEAEEEKLAHLPLAKTVSVEELLQYVELQDPVTRTQLRAMAAKTVCPPHKVELEALLGKQAYKEQVLAKRLTMLELLEKYPACEMSFSEFIALLPSIRPRYYSISSSPRVDLKQASITVSVVSGPAWSGYGEYKGIASNYLAELQEGDTITCFISTPQSEFTLPKDPETPLIMVGPGTGVAPFRGFVQARKQLKEQGQSLGEAHLYFGCRSPHEDYLYQEELENAQSEGIILLHTAFSRMPNQPKTYVQHVMEQDGKKLIELLDQGAHFYICGDGIQMAPAVEATLMKSYADVHQVSEADARLWLQQLEEKGRYAKDVWLG

SEQ ID NO: 1131 - DNA, 3147 bp, synthetic construct
  misc_feature 1..3147: note = variant of P450 oxidase from Bacillus megaterium
  source 1..3147: mol_type = other DNA
atgacaattaaggaaatgcctcagcctaagacgtttggagaacttaaaaatttaccgttattaaatacagataaaccggttcaagctttgatgcgtattgcggatgaattaggagaaatctttaaattcgaggcgcctggtagcgtaacgcgctatttatcaagtcagcgtctaattaaagaagcatgcgatgaatcacgctttgataaaaacttaagtcaagggcttaaatttgcacgtgattttgttggagacgggctggttacaagctggacgcatgaaccgaattggaaaaaagcgcataatatcttagttccaagctttagtcagcatgcaatggggcgttatcatgcgatgatggtcgatatcgccgtgcagcttgttcaaaagtgggagcgtctaaatgcagatgagcatattgaagtatcggaagacatgacacgtttaacgcttgatacaattggtctttgcctgtttaactatcgctttaacagcttttaccgagatacgcctcatccatttattgtgagtgtggttcgtgcactggatgaagtaatgaacaagctgcagcgagcaaatccagacgacccagcttatgatgaaaacaagcgccagtgtcaagaagatatcaaggtgatgaacgactatgtagataaaattattgcagatcgcaaagcaaggggtgaacaaagtcatgatttattaacgcgtatgctaaacggaaaagatccagtaacgggtgagccgcttgatgacgggaacattcgtcagcaaattattacattcttaattgcgggacaccaaacgacaagtggtcttttatcatttgcgctgtatttcttagtgaaaaatccacgtgtattacaaaaagtagcagaagaagcagcacgagttctagtagatcctgttccaagctacaaacaagtcaaacagcttaaatatgttggcatggtcttaaacgaagcgctgcgcttatggccagtagcgcctatgttttccctatatgcaaaagaagatacggtgcttggaggagaatatcctttaacgaaaggcgacgaagtaatggttctggtgcctcagcttcaccgtgataaaacaatttggggagacgatgtggaggagttccgtccagagcgttttgaaaatccaagtgcgattccgcagcatgcgtttaaaccgtttggaaacggtcagcgtgcgtgtatcggtcagcagttcgctcttcatagtgcaacgctggtacttggtatgatgctaaaacactttgactttgaagatcatacaaactacgagctcgttattaaagaatcgcggacgttaaaacctgaaggctttgtggtaaaagcaaaatcgaaaggcattccgcttggcggtattccttcacctagcactgaacagtctgctaaaaaagtacgcaaaaaggcagaaaacgctcataatacgccgctgcttgtgctatacggttcaaatgcgggaacagctgaaggaacggcgcgtgatttagcagatattgcaatgagcaaaggatttgcaccgcaggtcgcaacgcttgattcacacgccggtaatcttccgcgcgaaggagctgtattaattgtaacggcgtcttataacggtcatccgcctgataacgcaaagcaatttgtcgattggttagaccaagcgtctgcggatgaagtaaaaggcgttcgctactccgtatttggatgcggcgataaaaattgggcggggacgtatcaaaaagtgcctgcttttatcgatgaaacgcttgccgctaaaggggcagaaaacatcgctaagcgcggtgaagcagatgcaagcgacgactttgaaggcgcgtatgaagaatggcgtgatcatatgtggagtgacgtagcagcctactttggtctcgacattgaaaacagtgaagataataaatctactctttcacttcaatttgtcgacagcgcggcggatatgcctcttgcgaaaatgcacggtgcgttttcaacgaacgtcgtagcaagcaaagaacttcaacagcctggcagtgcacgaagcacgcgacatcttgaaattgaacttccaaaagaagcttcttatcaagaaggagatcatttaggtgttattcctcgctattatgaaggaatagtaaaccgtgtaacacagaggttcggcctaagcgcatcacagctgatccgtctggaagcagaagaagaaaaattagctcatttgccactcgctaaaacagtatccgtagaagagcttctgcaatacgtggagcttcaagatcctgttacgcgcacgcagcttcgcgcaatggctgctaaaacggtctgcccgccgcataaagtagagcttgaagccttgcttggcaagcaagcctacaaagaacaagtgctggcaaaacgtttaacaatgcttgaactgcttgaaaaatacccggcgtgtgaaatgagtttcagcgaatttatcgcccttctgccaagcatacgcccgcgctattactcgatttcttcatcacctcgtgtcgatctgaaacaagcaagcatcacggtcagcgttgtcagcggaccggcgtggagcggatatggagaatataaaggaattgcgtcgaactatcttgctgagctgcaagaaggagatacgattacgtgctttatttccacaccgcagtcagagtttacgctgccaaaagaccctgaaacgccgcttatcatggtcggaccgggaacaggcgtcgcgccgtttagaggctttgtgcaggcgcgcaaacagctaaaagaacaaggacagtcacttggagaagcacatttatacttcggctgccgttcacctcatgaagactatctgtatcaagaagagcttgaaaacgcccaaagcgaaggcatcattctgcttcataccgctttttctcgcatgccgaatcagccgaaaacatacgttcagcacgtaatggaacaagacggcaagaaattgattgaacttcttgatcaaggagcgcacttctatatttgcggagacggaattcaaatggcacctgccgttgaagcaacgcttatgaaaagctatgctgacgttcaccaagtgagtgaagcagacgctcgcttatggctgcagcagctagaagaaaaaggccgatacgcaaaagacgtgtggctgggg

SEQ ID NO: 1132 - protein, 1049 aa, synthetic construct
  REGION 1..1049: note = variant of P450 oxidase from Bacillus megaterium
MTIKEMPQPKTFGELKNLPLLNTDKPVQALMRIADELGEIFKFEAPGSVTRYLSSQRLIKEACDESRFDKNLSQGLKFARDFVGDGLVTSWTHEPNWKKAHNILVPSFSQHAMGRYHAMMVDIAVQLVQKWERLNADEHIEVSEDMTRLTLDTIGLCLFNYRFNSFYRDTPHPFIVSVVRALDEVMNKLQRANPDDPAYDENKRQCQEDIKVMNDYVDKIIADRKARGEQSHDLLTRMLNGKDPVTGEPLDDGNIRQQIITFLIAGHQTTSGLLSFALYFLVKNPRVLQKVAEEAARVLVDPVPSYKQVKQLKYVGMVLNEALRLWPVAPMFSLYAKEDTVLGGEYPLTKGDEVMVLVPQLHRDKTIWGDDVEEFRPERFENPSAIPQHAFKPFGNGQRACIGQQFALHSATLVLGMMLKHFDFEDHTNYELVIKESRTLKPEGFVVKAKSKGIPLGGIPSPSTEQSAKKVRKKAENAHNTPLLVLYGSNAGTAEGTARDLADIAMSKGFAPQVATLDSHAGNLPREGAVLIVTASYNGHPPDNAKQFVDWLDQASADEVKGVRYSVFGCGDKNWAGTYQKVPAFIDETLAAKGAENIAKRGEADASDDFEGAYEEWRDHMWSDVAAYFGLDIENSEDNKSTLSLQFVDSAADMPLAKMHGAFSTNVVASKELQQPGSARSTRHLEIELPKEASYQEGDHLGVIPRYYEGIVNRVTQRFGLSASQLIRLEAEEEKLAHLPLAKTVSVEELLQYVELQDPVTRTQLRAMAAKTVCPPHKVELEALLGKQAYKEQVLAKRLTMLELLEKYPACEMSFSEFIALLPSIRPRYYSISSSPRVDLKQASITVSVVSGPAWSGYGEYKGIASNYLAELQEGDTITCFISTPQSEFTLPKDPETPLIMVGPGTGVAPFRGFVQARKQLKEQGQSLGEAHLYFGCRSPHEDYLYQEELENAQSEGIILLHTAFSRMPNQPKTYVQHVMEQDGKKLIELLDQGAHFYICGDGIQMAPAVEATLMKSYADVHQVSEADARLWLQQLEEKGRYAKDVWLG

SEQ ID NO: 1133 - DNA, 3147 bp, synthetic construct
  misc_feature 1..3147: note = variant of P450 oxidase from Bacillus megaterium
  source 1..3147: mol_type = other DNA
atgacaattaaggaaatgcctcagcctaagacgtttggagaacttaaaaatttaccgttattaaatacagataaaccggttcaagctttgatgcgtattgcggatgaattaggagaaatctttaaattcgaggcgcctggtagcgtaacgcgctatttatcaagtcagcgtctaattaaagaagcatgcgatgaatcacgctttgataaaaacttaagtcaagggcttaaatttgcacgtgattttgttggagacgggctggttacaagctggacgcatgaaccgaattggaaaaaagcgcataatatcttagttccaagctttagtcagcatgcaatgcaacgttatcatgcgatgatggtcgatatcgccgtgcagcttgttcaaaagtgggagcgtctaaatgcagatgagcatattgaagtatcggaagacatgacacgtttaacgcttgatacaattggtctttgcctgtttaactatcgctttaacagcttttaccgagatacgcctcatccatttattgtgagtgtggttcgtgcactggatgaagtaatgaacaagctgcagcgagcaaatccagacgatccagcttatgatgaaaacaagcgccagtgtcaagaagatatcaaggtgatgaacgactatgtagataaaattattgcagatcgcaaagcaaggggtgaacaaagtcatgatttattaacgcagatgctaaacggaaaagatccagtaacgggtgagccgcttgatgacgggaacattcgtcagcaaattattacattcttaattgcgggacaccaaacgacaagtggtcttttatcatttgcgctgtatttcttagtgaaaaatccacgtgtattacaaaaagtagcagaagaagcagcacgagttctagtagatcctgttccaagctacaaacaagtcaaacagcttaaatatgttggcatggtcttaaacgaagcgctgcgcttatggccagtagcgcctatgttttccctatatgcaaaagaagatacggtgcttggaggagaatatcctttaacgaaaggcgacgaagtaatggttctggtgcctcagcttcaccgtgataaaacaatttggggagacgatgtggaggagttccgtccagagcgttttgaaaatccaagtgcgattccgcagcatgcgtttaaaccgtttggaaacggtcagcgtgcgtgtatcggtcagcagttcgctcttcatagtgcaacgctggtacttggtatgatgctaaaacactttgactttgaagatcatacaaactacgagctcgttattaaagaatcgcggacgttaaaacctgaaggctttgtggtaaaagcaaaatcgaaaggcattccgcttggcggtattccttcacctagcactgaacagtctgctaaaaaagtacgcaaaaaggcagaaaacgctcataatacgccgctgcttgtgctatacggttcaaatgcgggaacagctgaaggaacggcgcgtgatttagcagatattgcaatgagcaaaggatttgcaccgcaggtcgcaacgcttgattcacacgccggtaatcttccgcgcgaaggagctgtattaattgtaacggcgtcttataacggtcatccgcctgataacgcaaagcaatttgtcgattggttagaccaagcgtctgcggatgaagtaaaaggcgttcgctactccgtatttggatgcggcgataaaaattgggcggggacgtatcaaaaagtgcctgcttttatcgatgaaacgcttgccgctaaaggggcagaaaacatcgctaagcgcggtgaagcagatgcaagcgacgactttgaaggcgcgtatgaagaatggcgtgatcatatgtggagtgacgtagcagcctactttggtctcgacattgaaaacagtgaagataataaatctactctttcacttcaatttgtcgacagcgcggcggatatgcctcttgcgaaaatgcacggtgcgttttcaacgaacgtcgtagcaagcaaagaacttcaacagcctggcagtgcacgaagcacgcgacatcttgaaattgaacttccaaaagaagcttcttatcaagaaggagatcatttaggtgttattcctcgctattatgaaggaatagtaaaccgtgtaacacagaggttcggcctaagcgcatcacagctgatccgtctggaagcagaagaagaaaaattagctcatttgccactcgctaaaacagtatccgtagaagagcttctgcaatacgtggagcttcaagatcctgttacgcgcacgcagcttcgcgcaatggctgctaaaacggtctgcccgccgcataaagtagagcttgaagccttgcttggcaagcaagcctacaaagaacaagtgctggcaaaacgtttaacaatgcttgaactgcttgaaaaatacccggcgtgtgaaatgagtttcagcgaatttatcgcccttctgccaagcatacgcccgcgctattactcgatttcttcatcacctcgtgtcgatctgaaacaagcaagcatcacggtcagcgttgtcagcggaccggcgtggagcggatatggagaatataaaggaattgcgtcgaactatcttgctgagctgcaagaaggagatacgattacgtgctttatttccacaccgcagtcagagtttacgctgccaaaagaccctgaaacgccgcttatcatggtcggaccgggaacaggcgtcgcgccgtttagaggctttgtgcaggcgcgcaaacagctaaaagaacaaggacagtcacttggagaagcacatttatacttcggctgccgttcacctcatgaagactatctgtatcaagaagagcttgaaaacgcccaaagcgaaggcatcattctgcttcataccgctttttctcgcatgccgaatcagccgaaaacatacgttcagcacgtaatggaacaagacggcaagaaattgattgaacttcttgatcaaggagcgcacttctatatttgcggagacggaattcaaatggcacctgccgttgaagcaacgcttatgaaaagctatgctgacgttcaccaagtgagtgaagcagacgctcgcttatggctgcagcagctagaagaaaaaggccgatacgcaaaagacgtgtggctgggg

SEQ ID NO: 1134 - protein, 1049 aa, synthetic construct
  REGION 1..1049: note = variant of P450 oxidase from Bacillus megaterium
MTIKEMPQPKTFGELKNLPLLNTDKPVQALMRIADELGEIFKFEAPGSVTRYLSSQRLIKEACDESRFDKNLSQGLKFARDFVGDGLVTSWTHEPNWKKAHNILVPSFSQHAMQRYHAMMVDIAVQLVQKWERLNADEHIEVSEDMTRLTLDTIGLCLFNYRFNSFYRDTPHPFIVSVVRALDEVMNKLQRANPDDPAYDENKRQCQEDIKVMNDYVDKIIADRKARGEQSHDLLTQMLNGKDPVTGEPLDDGNIRQQIITFLIAGHQTTSGLLSFALYFLVKNPRVLQKVAEEAARVLVDPVPSYKQVKQLKYVGMVLNEALRLWPVAPMFSLYAKEDTVLGGEYPLTKGDEVMVLVPQLHRDKTIWGDDVEEFRPERFENPSAIPQHAFKPFGNGQRACIGQQFALHSATLVLGMMLKHFDFEDHTNYELVIKESRTLKPEGFVVKAKSKGIPLGGIPSPSTEQSAKKVRKKAENAHNTPLLVLYGSNAGTAEGTARDLADIAMSKGFAPQVATLDSHAGNLPREGAVLIVTASYNGHPPDNAKQFVDWLDQASADEVKGVRYSVFGCGDKNWAGTYQKVPAFIDETLAAKGAENIAKRGEADASDDFEGAYEEWRDHMWSDVAAYFGLDIENSEDNKSTLSLQFVDSAADMPLAKMHGAFSTNVVASKELQQPGSARSTRHLEIELPKEASYQEGDHLGVIPRYYEGIVNRVTQRFGLSASQLIRLEAEEEKLAHLPLAKTVSVEELLQYVELQDPVTRTQLRAMAAKTVCPPHKVELEALLGKQAYKEQVLAKRLTMLELLEKYPACEMSFSEFIALLPSIRPRYYSISSSPRVDLKQASITVSVVSGPAWSGYGEYKGIASNYLAELQEGDTITCFISTPQSEFTLPKDPETPLIMVGPGTGVAPFRGFVQARKQLKEQGQSLGEAHLYFGCRSPHEDYLYQEELENAQSEGIILLHTAFSRMPNQPKTYVQHVMEQDGKKLIELLDQGAHFYICGDGIQMAPAVEATLMKSYADVHQVSEADARLWLQQLEEKGRYAKDVWLG

SEQ ID NO: 1135 - DNA, 3147 bp, synthetic construct
  misc_feature 1..3147: note = variant of P450 oxidase from Bacillus megaterium
  source 1..3147: mol_type = other DNA
atgacaattaaggaaatgcctcagcctaagacgtttggagaacttaaaaatttaccgttattaaatacagataaaccggttcaagctttgatgcgtattgcggatgaattaggagaaatctttaaattcgaggaacctggtagcgtaacgcgctatttatcaagtcagcgtctaattaaagaagcatgcgatgaatcacgctttgataaaaacttaagtcaagggcttaaatttgcacgtgattttgttggagacgggctggttacaagctggacgcatgaaccgaattggaaaaaagcgcataatatcttagttccaagctttagtcagcatgcaatggggcgttatcatgcgatgatggtcgatatcgccgtgcagcttgttcaaaagtgggagcgtctaaatgcagatgagcatattgaagtatcggaagacatgacacgtttaacgcttgatacaattggtctttgcctgtttaactatcgctttaacagcttttaccgagatacgcctcatccatttattgtgagtgtggttcgtgcactggatgaagtaatgaacaagctgcagcgagcaaatccagacgacccagcttatgatgaaaacaagcgccagtgtcaagaagatatcaaggtgatgaacgactatgtagataaaattattgcagatcgcaaagcaaggggtgaacaaagtcatgatttattaacgcagatgctaaacggaaaagatccagaaacgggtgagccgcttgatgacgggaacattcgtcagcaaattattacattcttaattgcgggacaccaaacgacaagtggtcttttatcatttgcgctgtatttcttagtgaaaaatccacgtgtattacaaaaagtagcagaagaagcagcacgagttctagtagatcctgttccaagctacaaacaagtcaaacagcttaaatatgttggcatggtcttaaacgaagcgctgcgcttatggccagtagcgcctatgttttccctatatgcaaaagaagatacggtgcttggaggagaatatccgttaacgaaaggcgacgaagtaatggttctggtgcctcagcttcaccgtgataaaacaatttggggagacgatgtggaggagttccgtccagagcgttttgaaaatccaagtgcgattccgcagcatgcgtttaaaccgtttggaaacggtcagcgtgcgtgtatcggtcagcagttcgctcttcatagtgcaacgctggtacttggtatgatgctaaaacactttgactttgaagatcatacaaactacgagctcgttattaaagaatcgcggacgttaaaacctgaaggctttgtggtaaaagcaaaatcgaaaggcattccgcttggcggtattccttcacctagcactgaacagtctgctaaaaaagtacgcaaaaaggcagaaaacgctcataatacgccgctgcttgtgctatacggttcaaatgcgggaacagctgaaggaacggcgcgtgatttagcagatattgcaatgagcaaaggatttgcaccgcaggtcgcaacgcttgattcacacgccggtaatcttccgcgcgaaggagctgtattaattgtaacggcgtcttataacggtcatccgcctgataacgcaaagcaatttgtcgattggttagaccaagcgtctgcggatgaagtaaaaggcgttcgctactccgtatttggatgcggcgataaaaattgggcggggacgtatcaaaaagtgcctgcttttatcgatgaaacgcttgccgctaaaggggcagaaaacatcgctaagcgcggtgaagcagatgcaagcgacgactttgaaggcgcgtatgaagaatggcgtgatcatatgtggagtgacgtagcagcctactttggtctcgacattgaaaacagtgaagataataaatctactctttcacttcaatttgtcgacagcgcggcggatatgcctcttgcgaaaatgcacggtgcgttttcaacgaacgtcgtagcaagcaaagaacttcaacagcctggcagtgcacgaagcacgcgacatcttgaaattgaacttccaaaagaagcttcttatcaagaaggagatcatttaggtgttattcctcgctattatgaaggaatagtaaaccgtgtaacacagaggttcggcctaagcgcatcacagctgatccgtctggaagcagaagaagaaaaattagctcatttgccactcgctaaaacagtatccgtagaagagcttctgcaatacgtggagcttcaagatcctgttacgcgcacgcagcttcgcgcaatggctgctaaaacggtctgcccgccgcataaagtagagcttgaagccttgcttggcaagcaagcctacaaagaacaagtgctggcaaaacgtttaacaatgcttgaactgcttgaaaaatacccggcgtgtgaaatgagtttcagcgaatttatcgcccttctgccaagcatacgcccgcgctattactcgatttcttcatcacctcgtgtcgatctgaaacaagcaagcatcacggtcagcgttgtcagtggactggcgtggagcggatatggagaatataaaggaattgcgtcgaactatcttgctgagctgcaagaaggagatacgattacgtgctttatttccacaccgcagtcagagtttacgctgccaaaagaccctgaaacgccgcttatcatggtcggaccgggaacaggcgtcgcgccgtttagaggctttgtgcaggcgcgcaaacagctaaaagaacaaggacagtcacttggagaagcacatttatacttcggctgccgttcacctcatgaagactatctgtatcaagaagagcttgaaaacgcccaaagcgaaggcatcattctgcttcataccgctttttctcgcatgccgaatcagccgaaaacatacgttcagcacgtaatggaacaagacggcaagaaattgattgaacttcttgatcaaggagcgcacttctatatttgcggagacggaattcaaatggcacctgccgttgaagcaacgcttatgaaaagctatgctgacgttcaccaagtgagtgaagcagacgctcgcttatggctgcagcagctagaagaaaaaggccgatacgcaaaagacgtgtggctgggg

SEQ ID NO: 1136 - protein, 1049 aa, synthetic construct
  REGION 1..1049: note = variant of P450 oxidase from Bacillus megaterium
MTIKEMPQPKTFGELKNLPLLNTDKPVQALMRIADELGEIFKFEEPGSVTRYLSSQRLIKEACDESRFDKNLSQGLKFARDFVGDGLVTSWTHEPNWKKAHNILVPSFSQHAMGRYHAMMVDIAVQLVQKWERLNADEHIEVSEDMTRLTLDTIGLCLFNYRFNSFYRDTPHPFIVSVVRALDEVMNKLQRANPDDPAYDENKRQCQEDIKVMNDYVDKIIADRKARGEQSHDLLTQMLNGKDPETGEPLDDGNIRQQIITFLIAGHQTTSGLLSFALYFLVKNPRVLQKVAEEAARVLVDPVPSYKQVKQLKYVGMVLNEALRLWPVAPMFSLYAKEDTVLGGEYPLTKGDEVMVLVPQLHRDKTIWGDDVEEFRPERFENPSAIPQHAFKPFGNGQRACIGQQFALHSATLVLGMMLKHFDFEDHTNYELVIKESRTLKPEGFVVKAKSKGIPLGGIPSPSTEQSAKKVRKKAENAHNTPLLVLYGSNAGTAEGTARDLADIAMSKGFAPQVATLDSHAGNLPREGAVLIVTASYNGHPPDNAKQFVDWLDQASADEVKGVRYSVFGCGDKNWAGTYQKVPAFIDETLAAKGAENIAKRGEADASDDFEGAYEEWRDHMWSDVAAYFGLDIENSEDNKSTLSLQFVDSAADMPLAKMHGAFSTNVVASKELQQPGSARSTRHLEIELPKEASYQEGDHLGVIPRYYEGIVNRVTQRFGLSASQLIRLEAEEEKLAHLPLAKTVSVEELLQYVELQDPVTRTQLRAMAAKTVCPPHKVELEALLGKQAYKEQVLAKRLTMLELLEKYPACEMSFSEFIALLPSIRPRYYSISSSPRVDLKQASITVSVVSGLAWSGYGEYKGIASNYLAELQEGDTITCFISTPQSEFTLPKDPETPLIMVGPGTGVAPFRGFVQARKQLKEQGQSLGEAHLYFGCRSPHEDYLYQEELENAQSEGIILLHTAFSRMPNQPKTYVQHVMEQDGKKLIELLDQGAHFYICGDGIQMAPAVEATLMKSYADVHQVSEADARLWLQQLEEKGRYAKDVWLG

SEQ ID NO: 1137 - DNA, 3147 bp, synthetic construct
  misc_feature 1..3147: note = variant of P450 oxidase from Bacillus megaterium
  source 1..3147: mol_type = other DNA
atgacaattaaggaaatgcctcagcctaagacgtttggagaacttaaaaatttaccgttattaaatacagataaaccggttcaagctttgatgcgtattgcggatgaattaggagaaatctttaaattcgaggcgcctggtagcgtaacgcgctatttatcaagtcagcgtctaattaaagaagcatgcgatgaatcacgctttgataaaaacttaagtcaagggcttaaatttgcacgtgattttgttggagacgggctggttacaagctggacgcatgaaccgaattggaaaaaagcgcataatatcttagttccaagctttagtcagcgcgcaatggggcgttatcatgcgatgatggtcgatatcgccgtgcagcttgttcaaaagtgggagcgtctaaatgcagatgagcatattgaagtatcggaagacatgacacgtttaacgcttgatacaattggtctttgcctgtttaactatcgctttaacagcttttaccgagatacgcctcatccatttattgtgagtgtggttcgtgcactggatgaagtaatgaacaagctgcagcgagcaaatcctgacgacccagcttatgatgaaaacaagcgccagtgtcaagaagataccaaggtgatgaacgactatgtagataaaattattgcagatcgcaaagcaaggggtgaacaaagtcatgatttattaacgcagatgctaaacggaaaagatcctgaaacgggtgagccgcttgatgacgggaacattcgtcagcaaattattacattcttaattgcgggacaccaaacgacaagtggtcttttatcatttgcgctgtatttcttagtgaaaaatccacgtgtattacaaaaagtagcagaagaagcagcacgagttctagtagatcctgttccaagctacaaacaagtcaaacagcttaaatatgttggcatggtcttaaacgaagcgctgcgcttatggccagtagcgcctatgttttccctatatgcaaaagaagatacggtgcttggaggagaatattcgttaacgaaaggcgacgaagtaatggttctggtgcctcagcttcaccgtgataaaacaatttggggagacgatgtggaggagttccgtccagagcgttttgaaaatccaagtgcgattccgcagcatgcgtttaaaccgtttggaaacggtcagcgtgcgtgtatcggtcagcagttcgctcttcatagtgcaacgctggtacttggtatgatgctaaaacactttgactttgaagatcatacaaactacgagctcgttattaaagaatcgcggacgttaaaacctgaaggctttgtggtaaaagcaaaatcgaaaggcattccgcttggcggtattccttcacctagcactgaacagtctgctaaaaaagtacgcaaaaaggcagaaaacgctcataatacgccgctgcttgtgctatacggttcaaatgcgggaacagctgaaggaacggcgcgtgatttagcagatattgcaatgagcaaaggatttgcaccgcaggtcgcaacgcttgattcacacgccggtaatcttccgcgcgaaggagctgtattaattgtaacggcgtcttataacggtcatccgcctgataacgcaaagcaatttgtcgattggttagaccaagcgtctgcggatgaagtaaaaggcgttcgctactccgtatttggatgcggcgataaaaattgggcggggacgtatcaaaaagtgcctgcttttatcgatgaaacgcttgccgctaaaggggcagaaaacatcgctaagcgcggtgaagcagatgcaagcgacgactttgaaggcgcgtatgaagaatggcgtgatcatatgtggagtgacgtagcagcctactttggtctcgacattgaaaacagtgaagataataaatctactctttcacttcaatttgtcgacagcgcggcggatatgcctcttgcgaaaatgcacggtgcgttttcaacgaacgtcgtagcaagcaaagaacttcaacagcctggcagtgcacgaagcacgcgacatcttgaaattgaacttccaaaagaagcttcttatcaagaaggagatcatttaggtgttattcctcgctattatgaaggaatagtaaaccgtgtaacacagaggttcggcctaagcgcatcacagctgatccgtctggaagcagaagaagaaaaattagctcatttgccactcgctaaaacagtatccgtagaagagcttctgcaatacgtggagcttcaagatcctgttacgcgcacgcagcttcgcgcaatggctgctaaaacggtctgcccgccgcataaagtagagcttgaagccttgcttggcaagcaagcctacaaagaacaagtgctggcaaaacgtttaacaatgcttgaactgcttgaaaaatacccggcgtgtgaaatgagtttcagcgaatttatcgcccttctgccaagcatacgcccgcgctattactcgatttcttcatcacctcgtgtcgatctgaaacaagcaagcatcacggtcagcgttgtcagtggactggcgtggagcggatatggagaatataaaggaattgcgtcgaactatcttgctgagctgcaagaaggagatacgattacgtgctttatttccacaccgcagtcagagtttacgctgccaaaagaccctgaaacgccgcttatcatggtcggaccgggaacaggcgtcgcgccgtttagaggctttgtgcaggcgcgcaaacagctaaaagaacaaggacagtcacttggagaagcacatttatacttcggctgccgttcacctcatgaagactatctgtatcaagaagagcttgaaaacgcccaaagcgaaggcatcattctgcttcataccgctttttctcgcatgccgaatcagccgaaaacatacgttcagcacgtaatggaacaagacggcaagaaattgattgaacttcttgatcaaggagcgcacttctatatttgcggagacggaattcaaatggcacctgccgttgaagcaacgcttatgaaaagctatgctgacgttcaccaagtgagtgaagcagacgctcgcttatggctgcagcagctagaagaaaaaggccgatacgcaaaagacgtgtggctgggg

SEQ ID NO: 1138 - protein, 1049 aa, synthetic construct
  REGION 1..1049: note = variant of P450 oxidase from Bacillus megaterium
MTIKEMPQPKTFGELKNLPLLNTDKPVQALMRIADELGEIFKFEAPGSVTRYLSSQRLIKEACDESRFDKNLSQGLKFARDFVGDGLVTSWTHEPNWKKAHNILVPSFSQRAMGRYHAMMVDIAVQLVQKWERLNADEHIEVSEDMTRLTLDTIGLCLFNYRFNSFYRDTPHPFIVSVVRALDEVMNKLQRANPDDPAYDENKRQCQEDTKVMNDYVDKIIADRKARGEQSHDLLTQMLNGKDPETGEPLDDGNIRQQIITFLIAGHQTTSGLLSFALYFLVKNPRVLQKVAEEAARVLVDPVPSYKQVKQLKYVGMVLNEALRLWPVAPMFSLYAKEDTVLGGEYSLTKGDEVMVLVPQLHRDKTIWGDDVEEFRPERFENPSAIPQHAFKPFGNGQRACIGQQFALHSATLVLGMMLKHFDFEDHTNYELVIKESRTLKPEGFVVKAKSKGIPLGGIPSPSTEQSAKKVRKKAENAHNTPLLVLYGSNAGTAEGTARDLADIAMSKGFAPQVATLDSHAGNLPREGAVLIVTASYNGHPPDNAKQFVDWLDQASADEVKGVRYSVFGCGDKNWAGTYQKVPAFIDETLAAKGAENIAKRGEADASDDFEGAYEEWRDHMWSDVAAYFGLDIENSEDNKSTLSLQFVDSAADMPLAKMHGAFSTNVVASKELQQPGSARSTRHLEIELPKEASYQEGDHLGVIPRYYEGIVNRVTQRFGLSASQLIRLEAEEEKLAHLPLAKTVSVEELLQYVELQDPVTRTQLRAMAAKTVCPPHKVELEALLGKQAYKEQVLAKRLTMLELLEKYPACEMSFSEFIALLPSIRPRYYSISSSPRVDLKQASITVSVVSGLAWSGYGEYKGIASNYLAELQEGDTITCFISTPQSEFTLPKDPETPLIMVGPGTGVAPFRGFVQARKQLKEQGQSLGEAHLYFGCRSPHEDYLYQEELENAQSEGIILLHTAFSRMPNQPKTYVQHVMEQDGKKLIELLDQGAHFYICGDGIQMAPAVEATLMKSYADVHQVSEADARLWLQQLEEKGRYAKDVWLG

SEQ ID NO: 1139 - DNA, 3147 bp, synthetic construct
  misc_feature 1..3147: note = variant of P450 oxidase from Bacillus megaterium
  source 1..3147: mol_type = other DNA
atgacaattaaggaaatgcctcagcctaagacgtttggagaacttaaaaatttaccgttattaaatacagataaaccggttcaagctttgatgcgtattgcggatgaattaggagaaatctttaaattcgaggcgcctggtagcgtaacgcgctatttatcaagtcagcgtctaattaaagaagcatgcgatgaatcacgctttgataaaaacttaagtcaagggcttaaatttgcacgtgattttgttggagacgggctggttacaagctggacgcatgaaccgaattggaaaaaagcgcataatatcttagttccaagctttagtcagctggcaatggggcgttatcatgcgatgatggtcgatatcgccgtgcagcttgttcaaaagtgggagcgtctaaatgcagatgagcatattgaagtatcggaagacatgacacgtttaacgcttgatacaattggtctttgcctgtttaactatcgctttaacagcttttaccgagatacgcctcatccatttattgtgagtgtggttcgtgcactggatgaagtaatgaacaagctgcagcgagcaaatccagacgacccagcttatgatgaaaacaagcgccagtgtcaagaagatatcaaggtgatgaacgactatgtagataaaattattgcagatcgcaaagcaaggggtgaacaaagtcatgatttattaacgcagatgctaaacggaaaagatccagaaacgggtgagccgcttgatgacgggaacattcgtcagcaaattattacattcttaattgcgggacaccaaacgacaagtggtcttttatcatttgcgctgtatttcttagtgaaaaatccacgtgtattacaaaaagtagcagaagaagcagcacgagttctagtagatcctgttccaagctacaaacaagtcaaacagcttaaatatgttggcatggtcttaaacgaagcgctgcgcttatggccagtagcgcctatgttttccctatatgcaaaagaagatacggtgcttggaggagaatatcctttaacgaaaggcgacgaagtaatggttctggtgcctcagcttcaccgtgataaaacaatttggggagacgatgtggaggagttccgtccagagcgttttgaaaatccaagtgcgattccgcagcatgcgtttaaaccgtttggaaacggtcagcgtgcgtgtatcggtcagcagttcgctcttcatagtgcaacgctggtacttggtatgatgctaaaacactttgactttgaagatcatacaaactacgagctcgttattaaagaatcgcggacgttaaaacctgaaggctttgtggtaaaagcaaaatcgaaaggcattccgcttggcggtattccttcacctagcactgaacagtctgctaaaaaagtacgcaaaaaggcagaaaacgctcataatacgccgctgcttgtgctatacggttcaaatgcgggaacagctgaaggaacggcgcgtgatttagcagatattgcaatgagcaaaggatttgcaccgcaggtcgcaacgcttgattcacacgccggtaatcttccgcgcgaaggagctgtattaattgtaacggcgtcttataacggtcatccgcctgataacgcaaagcaatttgtcgattggttagaccaagcgtctgcggatgaagtaaaaggcgttcgctactccgtatttggatgcggcgataaaaattgggcggggacgtatcaaaaagtgcctgcttttatcgatgaaacgcttgccgctaaaggggcagaaaacatcgctaagcgcggtgaagcagatgcaagcgacgactttgaaggcgcgtatgaagaatggcgtgatcatatgtggagtgacgtagcagcctactttggtctcgacattgaaaacagtgaagataataaatctactctttcacttcaatttgtcgacagcgcggcggatatgcctcttgcgaaaatgcacggtgcgttttcaacgaacgtcgtagcaagcaaagaacttcaacagcctggcagtgcacgaagcacgcgacatcttgaaattgaacttccaaaagaagcttcttatcaagaaggagatcatttaggtgttattcctcgctattatgaaggaatagtaaaccgtgtaacacagaggttcggcctaagcgcatcacagctgatccgtctggaagcagaagaagaaaaattagctcatttgccactcgctaaaacagtatccgtagaagagcttctgcaatacgtggagcttcaagatcctgttacgcgcacgcagcttcgcgcaatggctgctaaaacggtctgcccgccgcataaagtagagcttgaagccttgcttggcaagcaagcctacaaagaacaagtgctggcaaaacgtttaacaatgcttgaactgcttgaaaaatacccggcgtgtgaaatgagtttcagcgaatttatcgcccttctgccaagcatacgcccgcgctattactcgatttcttcatcacctcgtgtcgatctgaaacaagcaagcatcacggtcagcgttgtcagtggaccggcgtggagcggatatggagaatataaaggaattgcgtcgaactatcttgctgagctgcaagaaggagatacgattacgtgctttatttccacaccgcagtcagagtttacgctgccaaaagaccctgaaacgccgcttatcatggtcggaccgggaacaggcgtcgcgccgtttagaggctttgtgcaggcgcgcaaacagctaaaagaacaaggacagtcacttggagaagcacatttatacttcggctgccgttcacctcatgaagactatctgtatcaagaagagcttgaaaacgcccaaagcgaaggcatcattctgcttcataccgctttttctcgcatgccgaatcagccgaaaacatacgttcagcacgtaatggaacaagacggcaagaaattgattgaacttcttgatcaaggagcgcacttctatatttgcggagacggaattcaaatggcacctgccgttgaagcaacgcttatgaaaagctatgctgacgttcaccaagtgagtgaagcagacgctcgcttatggctgcagcagctagaagaaaaaggccgatacgcaaaagacgtgtggctgggg

SEQ ID NO: 1140 - protein, 1049 aa, synthetic construct
  REGION 1..1049: note = variant of P450 oxidase from Bacillus megaterium
MTIKEMPQPKTFGELKNLPLLNTDKPVQALMRIADELGEIFKFEAPGSVTRYLSSQRLIKEACDESRFDKNLSQGLKFARDFVGDGLVTSWTHEPNWKKAHNILVPSFSQLAMGRYHAMMVDIAVQLVQKWERLNADEHIEVSEDMTRLTLDTIGLCLFNYRFNSFYRDTPHPFIVSVVRALDEVMNKLQRANPDDPAYDENKRQCQEDIKVMNDYVDKIIADRKARGEQSHDLLTQMLNGKDPETGEPLDDGNIRQQIITFLIAGHQTTSGLLSFALYFLVKNPRVLQKVAEEAARVLVDPVPSYKQVKQLKYVGMVLNEALRLWPVAPMFSLYAKEDTVLGGEYPLTKGDEVMVLVPQLHRDKTIWGDDVEEFRPERFENPSAIPQHAFKPFGNGQRACIGQQFALHSATLVLGMMLKHFDFEDHTNYELVIKESRTLKPEGFVVKAKSKGIPLGGIPSPSTEQSAKKVRKKAENAHNTPLLVLYGSNAGTAEGTARDLADIAMSKGFAPQVATLDSHAGNLPREGAVLIVTASYNGHPPDNAKQFVDWLDQASADEVKGVRYSVFGCGDKNWAGTYQKVPAFIDETLAAKGAENIAKRGEADASDDFEGAYEEWRDHMWSDVAAYFGLDIENSEDNKSTLSLQFVDSAADMPLAKMHGAFSTNVVASKELQQPGSARSTRHLEIELPKEASYQEGDHLGVIPRYYEGIVNRVTQRFGLSASQLIRLEAEEEKLAHLPLAKTVSVEELLQYVELQDPVTRTQLRAMAAKTVCPPHKVELEALLGKQAYKEQVLAKRLTMLELLEKYPACEMSFSEFIALLPSIRPRYYSISSSPRVDLKQASITVSVVSGPAWSGYGEYKGIASNYLAELQEGDTITCFISTPQSEFTLPKDPETPLIMVGPGTGVAPFRGFVQARKQLKEQGQSLGEAHLYFGCRSPHEDYLYQEELENAQSEGIILLHTAFSRMPNQPKTYVQHVMEQDGKKLIELLDQGAHFYICGDGIQMAPAVEATLMKSYADVHQVSEADARLWLQQLEEKGRYAKDVWLG

SEQ ID NO: 1141 - DNA, 3147 bp, synthetic construct
  misc_feature 1..3147: note = variant of P450 oxidase from Bacillus megaterium
  source 1..3147: mol_type = other DNA
atgacaattaaggaaatgcctcagcctaagacgtttggagaacttaaaaatttaccgttattaaatacagataaaccggttcaagctttgatgcgtattgcggatgaattaggagaaatctttaaattcgaggcacctggtagcgtaacgcgctatttatcaagtcagcgtctaattaaagaagcatgcgatgaatcacgctttgataaaaacttaagtcaagggcttaaatttgcacgtgattttgttggagacgggctggttacaagctggacgcatgaaccgaattggaaaaaagcgcataatatcttagttccaagctttagtcagctggcaatggggcgttatcatgcgatgatggtcgatatcgccgtgcagatggttcaaaagtgggagcgtctaaatgcagatgagcatattgaagtatcggaagacatgacacgtttaacgcttgatacaattggtctttgcctgtttaactatcgctttaacagcttttaccgagatacgcctcatccatttattgtgagtgtggttcgtgcactggatgaagtaatgaacaagctgcagcgagcaaatccagacgacccagcttatgatgaaaacaagcgccagtgtcaagaagatatcaaggtgatgaacgactatgtagataaaattattgcagatcgcaaaaacaggggtgaacaaagtcatgatttattaacgcagatgctaaacggaaaagattatgaaacgggtgagccgcttgatgacgggaacattcgtcagcaaattattacattcttaattgcgggacaccaaacgacaagtggtcttttatcatttgcgctgtatttcttagtgaaaaatccacgtgtattacaaaaagtagcagaagaagcagcacgagttctagtagatcctgttccaagctacaaacaagtcaaacagcttaaatatgttggcatggtcttaaacgaagcgctgcgcttatggccagtagcgcctatgttttccctatatgcaaaagaagatacggtgcttggaggagaatatccgttaacgaaaggcgacgaagtaatggttctggtgcctcagcttcaccgtgataaaacaatttggggagacgatgtggaggagttccgtccagagcgttttgaaaatccaagtgcgattccgcagcatgcgtttaaaccgtttggaaacggtcagcgtgcgtgtatcggtcagcagttcgctcttcatagtgcaacgctggtacttggtatgatgctaaaacactttgactttgaagatcatacaaactacgagctcgttattaaagaatcgcggacgttaaaacctgaaggctttgtggtaaaagcaaaatcgaaaggcattccgcttggcggtattccttcacctagcactgaacagtctgctaaaaaagtacgcaaaaaggcagaaaacgctcataatacgccgctgcttgtgctatacggttcaaatgcgggaacagctgaaggaacggcgcgtgatttagcagatattgcaatgagcaaaggatttgcaccgcaggtcgcaacgcttgattcacacgccggtaatcttccgcgcgaaggagctgtattaattgtaacggcgtcttataacggtcatccgcctgataacgcaaagcaatttgtcgattggttagaccaagcgtctgcggatgaagtaaaaggcgttcgctactccgtatttggatgcggcgataaaaattgggcggggacgtatcaaaaagtgcctgcttttatcgatgaaacgcttgccgctaaaggggcagaaaacatcgctaagcgcggtgaagcagatgcaagcgacgactttgaaggcgcgtatgaagaatggcgtgatcatatgtggagtgacgtagcagcctactttggtctcgacattgaaaacagtgaagataataaatctactctttcacttcaatttgtcgacagcgcggcggatatgcctcttgcgaaaatgcacggtgcgttttcaacgaacgtcgtagcaagcaaagaacttcaacagcctggcagtgcacgaagcacgcgacatcttgaaattgaacttccaaaagaagcttcttatcaagaaggagatcatttaggtgttattcctcgctattatgaaggaatagtaaaccgtgtaacacagaggttcggcctaagcgcatcacagctgatccgtctggaagcagaagaagaaaaattagctcatttgccactcgctaaaacagtatccgtagaagagcttctgcaatacgtggagcttcaagatcctgttacgcgcacgcagcttcgcgcaatggctgctaaaacggtctgcccgccgcataaagtagagcttgaagccttgcttggcaagcaagcctacaaagaacaagtgctggcaaaacgtttaacaatgcttgaactgcttgaaaaatacccggcgtgtgaaatgagtttcagcgaatttatcgcccttctgccaagcatacgcccgcgctattactcgatttcttcatcacctcgtgtcgatctgaaacaagcaagcatcacggtcagcgttgtcagtggaccggcgtggagcggatatggagaatataaaggaattgcgtcgaactatcttgctgagctgcaagaaggagatacgattacgtgctttatttccacaccgcagtcagagtttacgctgccaaaagaccctgaaacgccgcttatcatggtcggaccgggaacaggcgtcgcgccgtttagaggctttgtgcaggcgcgcaaacagctaaaagaacaaggacagtcacttggagaagcacatttatacttcggctgccgttcacctcatgaagactatctgtatcaagaagagcttgaaaacgcccaaagcgaaggcatcattctgcttcataccgctttttctcgcatgccgaatcagccgaaaacatacgttcagcacgtaatggaacaagacggcaagaaattgattgaacttcttgatcaaggagcgcacttctatatttgcggagacggaattcaaatggcacctgccgttgaagcaacgcttatgaaaagctatgctgacgttcaccaagtgagtgaagcagacgctcgcttatggctgcagcagctagaagaaaaaggccgatacgcaaaagacgtgtggctgggg

SEQ ID NO: 1142 - protein, 1049 aa, synthetic construct
  REGION 1..1049: note = variant of P450 oxidase from Bacillus megaterium
MTIKEMPQPKTFGELKNLPLLNTDKPVQALMRIADELGEIFKFEAPGSVTRYLSSQRLIKEACDESRFDKNLSQGLKFARDFVGDGLVTSWTHEPNWKKAHNILVPSFSQLAMGRYHAMMVDIAVQMVQKWERLNADEHIEVSEDMTRLTLDTIGLCLFNYRFNSFYRDTPHPFIVSVVRALDEVMNKLQRANPDDPAYDENKRQCQEDIKVMNDYVDKIIADRKNRGEQSHDLLTQMLNGKDYETGEPLDDGNIRQQIITFLIAGHQTTSGLLSFALYFLVKNPRVLQKVAEEAARVLVDPVPSYKQVKQLKYVGMVLNEALRLWPVAPMFSLYAKEDTVLGGEYPLTKGDEVMVLVPQLHRDKTIWGDDVEEFRPERFENPSAIPQHAFKPFGNGQRACIGQQFALHSATLVLGMMLKHFDFEDHTNYELVIKESRTLKPEGFVVKAKSKGIPLGGIPSPSTEQSAKKVRKKAENAHNTPLLVLYGSNAGTAEGTARDLADIAMSKGFAPQVATLDSHAGNLPREGAVLIVTASYNGHPPDNAKQFVDWLDQASADEVKGVRYSVFGCGDKNWAGTYQKVPAFIDETLAAKGAENIAKRGEADASDDFEGAYEEWRDHMWSDVAAYFGLDIENSEDNKSTLSLQFVDSAADMPLAKMHGAFSTNVVASKELQQPGSARSTRHLEIELPKEASYQEGDHLGVIPRYYEGIVNRVTQRFGLSASQLIRLEAEEEKLAHLPLAKTVSVEELLQYVELQDPVTRTQLRAMAAKTVCPPHKVELEALLGKQAYKEQVLAKRLTMLELLEKYPACEMSFSEFIALLPSIRPRYYSISSSPRVDLKQASITVSVVSGPAWSGYGEYKGIASNYLAELQEGDTITCFISTPQSEFTLPKDPETPLIMVGPGTGVAPFRGFVQARKQLKEQGQSLGEAHLYFGCRSPHEDYLYQEELENAQSEGIILLHTAFSRMPNQPKTYVQHVMEQDGKKLIELLDQGAHFYICGDGIQMAPAVEATLMKSYADVHQVSEADARLWLQQLEEKGRYAKDVWLG

SEQ ID NO: 1143 - DNA, 3147 bp, synthetic construct
  misc_feature 1..3147: note = variant of P450 oxidase from Bacillus megaterium
  source 1..3147: mol_type = other DNA
atgacaattaaggaaatgcctcagcctaagacgtttggagaacttaaaaatttaccgttattaaatacagataaaccggttcaagctttgatgcgtattgcggatgaattaggagaaatctttaaattcgaggcacctggtagcgtaacgcgctatttatcaagtcagcgtctaattaaagaagcatgcgatgaatcacgctttgataaaaacttaagtcaagggcttaaatttgcacgtgattttgttggagacgggctggttacaagctggacgcatgaaccgaattggaaaaaagcgcataatatcttagttccaagctttagtcagcacgcaatggggcgttatcatgcgatgatggtcgatatcgccgtgcagctggttcaaaagtgggagcgtctaaatgcagatgagcatattgaagtatcggaagacatgacacgtttaacgcttgatacaattggtctttgcctgtttaactatcgctttaacagcttttaccgagatacgcctcatccatttattgtgagtgtggttcgtgcactggatgaagtaatgaacaagctgcagcgagcaaatccagacgacccagcttatgatgaaaacaagcgccagtgtcaagaagataccaaggtgatgaacgactatgtagataaaattattgcagatcgcaaagcaaggggtgaacaaagtcatgatttattaacgcagatgctaaacggaaaagatccagaaacgggtgagccgcttgatgacgggaacattcgtcagcaaattattacattcttaattgcgggacaccaaacgacaagtggtcttttatcatttgcgctgtatttcttagtgaaaaatccacgtgtattacaaaaagtagcagaagaagcagcacgagttctagtagatcctgttccaagctacaaacaagtcaaacagcttaaatatgttggcatggtcttaaacgaagcgctgcgcttatggccagtagcgcctatgttttccctatatgcaaaagaagatacggtgcttggaggagaatatcctttaacgaaaggcgacgaagtaatggttctggtgcctcagcttcaccgtgataaaacaatttggggagacgatgtggaggagttccgtccagagcgttttgaaaatccaagtgcgattccgcagcatgcgtttaaaccgtttggaaacggtcagcgtgcgtgtatcggtcagcagttcgctcttcatagtgcaacgctggtacttggtatgatgctaaaacactttgactttgaagatcatacaaactacgagctcgttattaaagaatcgcggacgttaaaacctgaaggctttgtggtaaaagcaaaatcgaaaggcattccgcttggcggtattccttcacctagcactgaacagtctgctaaaaaagtacgcaaaaaggcagaaaacgctcataatacgccgctgcttgtgctatacggttcaaatgcgggaacagctgaaggaacggcgcgtgatttagcagatattgcaatgagcaaaggatttgcaccgcaggtcgcaacgcttgattcacacgccggtaatcttccgcgcgaaggagctgtattaattgtaacggcgtcttataacggtcatccgcctgataacgcaaagcaatttgtcgattggttagaccaagcgtctgcggatgaagtaaaaggcgttcgctactccgtatttggatgcggcgataaaaattgggcggggacgtatcaaaaagtgcctgcttttatcgatgaaacgcttgccgctaaaggggcagaaaacatcgctaagcgcggtgaagcagatgcaagcgacgactttgaaggcgcgtatgaagaatggcgtgatcatatgtggagtgacgtagcagcctactttggtctcgacattgaaaacagtgaagataataaatctactctttcacttcaatttgtcgacagcgcggcggatatgcctcttgcgaaaatgcacggtgcgttttcaacgaacgtcgtagcaagcaaagaacttcaacagcctggcagtgcacgaagcacgcgacatcttgaaattgaacttccaaaagaagcttcttatcaagaaggagatcatttaggtgttattcctcgctattatgaaggaatagtaaaccgtgtaacacagaggttcggcctaagcgcatcacagctgatccgtctggaagcagaagaagaaaaattagctcatttgccactcgctaaaacagtatccgtagaagagcttctgcaatacgtggagcttcaagatcctgttacgcgcacgcagcttcgcgcaatggctgctaaaacggtctgcccgccgcataaagtagagcttgaagccttgcttggcaagcaagcctacaaagaacaagtgctggcaaaacgtttaacaatgcttgaactgcttgaaaaatacccggcgtgtgaaatgagtttcagcgaatttatcgcccttctgccaagcatacgcccgcgctattactcgatttcttcatcacctcgtgtcgatctgaaacaagcaagcatcacggtcagcgttgtcagcggactggcgtggagcggatatggagaatataaaggaattgcgtcgaactatcttgctgagctgcaagaaggagatacgattacgtgctttatttccacaccgcagtcagagtttacgctgccaaaagaccctgaaacgccgcttatcatggtcggaccgggaacaggcgtcgcgccgtttagaggctttgtgcaggcgcgcaaacagctaaaagaacaaggacagtcacttggagaagcacatttatacttcggctgccgttcacctcatgaagactatctgtatcaagaagagcttgaaaacgcccaaagcgaaggcatcattctgcttcataccgctttttctcgcatgccgaatcagccgaaaacatacgttcagcacgtaatggaacaagacggcaagaaattgattgaacttcttgatcaaggagcgcacttctatatttgcggagacggaattcaaatggcacctgccgttgaagcaacgcttatgaaaagctatgctgacgttcaccaagtgagtgaagcagacgctcgcttatggctgcagcagctagaagaaaaaggccgatacgcaaaagacgtgtggctgggg

SEQ ID NO: 1144 - protein, 1049 aa, synthetic construct
  REGION 1..1049: note = variant of P450 oxidase from Bacillus megaterium
MTIKEMPQPKTFGELKNLPLLNTDKPVQALMRIADELGEIFKFEAPGSVTRYLSSQRLIKEACDESRFDKNLSQGLKFARDFVGDGLVTSWTHEPNWKKAHNILVPSFSQHAMGRYHAMMVDIAVQLVQKWERLNADEHIEVSEDMTRLTLDTIGLCLFNYRFNSFYRDTPHPFIVSVVRALDEVMNKLQRANPDDPAYDENKRQCQEDTKVMNDYVDKIIADRKARGEQSHDLLTQMLNGKDPETGEPLDDGNIRQQIITFLIAGHQTTSGLLSFALYFLVKNPRVLQKVAEEAARVLVDPVPSYKQVKQLKYVGMVLNEALRLWPVAPMFSLYAKEDTVLGGEYPLTKGDEVMVLVPQLHRDKTIWGDDVEEFRPERFENPSAIPQHAFKPFGNGQRACIGQQFALHSATLVLGMMLKHFDFEDHTNYELVIKESRTLKPEGFVVKAKSKGIPLGGIPSPSTEQSAKKVRKKAENAHNTPLLVLYGSNAGTAEGTARDLADIAMSKGFAPQVATLDSHAGNLPREGAVLIVTASYNGHPPDNAKQFVDWLDQASADEVKGVRYSVFGCGDKNWAGTYQKVPAFIDETLAAKGAENIAKRGEADASDDFEGAYEEWRDHMWSDVAAYFGLDIENSEDNKSTLSLQFVDSAADMPLAKMHGAFSTNVVASKELQQPGSARSTRHLEIELPKEASYQEGDHLGVIPRYYEGIVNRVTQRFGLSASQLIRLEAEEEKLAHLPLAKTVSVEELLQYVELQDPVTRTQLRAMAAKTVCPPHKVELEALLGKQAYKEQVLAKRLTMLELLEKYPACEMSFSEFIALLPSIRPRYYSISSSPRVDLKQASITVSVVSGLAWSGYGEYKGIASNYLAELQEGDTITCFISTPQSEFTLPKDPETPLIMVGPGTGVAPFRGFVQARKQLKEQGQSLGEAHLYFGCRSPHEDYLYQEELENAQSEGIILLHTAFSRMPNQPKTYVQHVMEQDGKKLIELLDQGAHFYICGDGIQMAPAVEATLMKSYADVHQVSEADARLWLQQLEEKGRYAKDVWLG

SEQ ID NO: 1145 - DNA, 3147 bp, synthetic construct
  misc_feature 1..3147: note = variant of P450 oxidase from Bacillus megaterium
  source 1..3147: mol_type = other DNA
atgacaattaaggaaatgcctcagcctaagacgtttggagaacttaaaaatttaccgttattaaatacagataaaccggttcaagctttgatgcgtattgcggatgaattaggagaaatctttaaattcgaggcacctggtagcgtaacgcgctatttatcaagtcagcgtctaattaaagaagcatgcgatgaatcacgctttgataaaaacttaagtcaagggcttaaatttgcacgtgattttgttggagacgggctggttacaagctggacgcatgaaccgaattggaaaaaagcgcataatatcttagttccaagctttagtcagtgggcaatggggcgttatcatgcgatgatggtcgatatcgccgtgcagcttgttcaaaagtgggagcgtctaaatgcagatgagcatattgaagtatcggaagacatgacacgtttaacgcttgatacaattggtctttgcctgtttaactatcgctttaacagcttttaccgagatacgcctcatccatttattgtgagtgtggttcgtgcactggatgaagtaatgaacaagctgcagcgagcaaatccagacgacccagcttatgatgaaaacaagcgccagtgtcaagaagatatcaaggtgatgaacgactatgtagataaaattattgcagatcgcaaaaacaggggtgaacaaagtcatgatttattaacgcagatgctaaacggaaaagatcctgaaacgggtgagccgcttgatgacgggaacattcgtcagcaaattattacattcttaattgcgggacaccaaacgacaagtggtcttttatcatttgcgctgtatttcttagtgaaaaatccacgtgtattacaaaaagtagcagaagaagcagcacgagttctagtagatcctgttccaagctacaaacaagtcaaacagcttaaatatgttggcatggtcttaaacgaagcgctgcgcttatggccagtagcgcctatgttttccctatatgcaaaagaagatacggtgcttggaggagaatatccgttaacgaaaggcgacgaagtaatggttctggtgcctcagcttcaccgtgataaaacaatttggggagacgatgtggaggagttccgtccagagcgttttgaaaatccaagtgcgattccgcagcatgcgtttaaaccgtttggaaacggtcagcgtgcgtgtatcggtcagcagttcgctcttcatagtgcaacgctggtacttggtatgatgctaaaacactttgactttgaagatcatacaaactacgagctcgttattaaagaatcgcggacgttaaaacctgaaggctttgtggtaaaagcaaaatcgaaaggcattccgcttggcggtattccttcacctagcactgaacagtctgctaaaaaagtacgcaaaaaggcagaaaacgctcataatacgccgctgcttgtgctatacggttcaaatgcgggaacagctgaaggaacggcgcgtgatttagcagatattgcaatgagcaaaggatttgcaccgcaggtcgcaacgcttgattcacacgccggtaatcttccgcgcgaaggagctgtattaattgtaacggcgtcttataacggtcatccgcctgataacgcaaagcaatttgtcgattggttagaccaagcgtctgcggatgaagtaaaaggcgttcgctactccgtatttggatgcggcgataaaaattgggcggggacgtatcaaaaagtgcctgcttttatcgatgaaacgcttgccgctaaaggggcagaaaacatcgctaagcgcggtgaagcagatgcaagcgacgactttgaaggcgcgtatgaagaatggcgtgatcatatgtggagtgacgtagcagcctactttggtctcgacattgaaaacagtgaagataataaatctactctttcacttcaatttgtcgacagcgcggcggatatgcctcttgcgaaaatgcacggtgcgttttcaacgaacgtcgtagcaagcaaagaacttcaacagcctggcagtgcacgaagcacgcgacatcttgaaattgaacttccaaaagaagcttcttatcaagaaggagatcatttaggtgttattcctcgctattatgaaggaatagtaaaccgtgtaacacagaggttcggcctaagcgcatcacagctgatccgtctggaagcagaagaagaaaaattagctcatttgccactcgctaaaacagtatccgtagaagagcttctgcaatacgtggagcttcaagatcctgttacgcgcacgcagcttcgcgcaatggctgctaaaacggtctgcccgccgcataaagtagagcttgaagccttgcttggcaagcaagcctacaaagaacaagtgctggcaaaacgtttaacaatgcttgaactgcttgaaaaatacccggcgtgtgaaatgagtttcagcgaatttatcgcccttctgccaagcatacgcccgcgctattactcgatttcttcatcacctcgtgtcgatctgaaacaagcaagcatcacggtcagcgttgtcagtggactggcgtggagcggatatggagaatataaaggaattgcgtcgaactatcttgctgagctgcaagaaggagatacgattacgtgctttatttccacaccgcagtcagagtttacgctgccaaaagaccctgaaacgccgcttatcatggtcggaccgggaacaggcgtcgcgccgtttagaggctttgtgcaggcgcgcaaacagctaaaagaacaaggacagtcacttggagaagcacatttatacttcggctgccgttcacctcatgaagactatctgtatcaagaagagcttgaaaacgcccaaagcgaaggcatcattctgcttcataccgctttttctcgcatgtcgaatcagccgaaaacatacgttcagcacgtaatggaacaagacggcaagaaattgattgaacttcttgatcaaggagcgcacttctatatttgcggagacggaattcaaatggcacctgccgttgaagcaacgcttatgaaaagctatgctgacgttcaccaagtgagtgaagcagacgctcgcttatggctgcagcagctagaagaaaaaggccgatacgcaaaagacgtgtggctgggg

SEQ ID NO: 1146 - protein, 1049 aa, synthetic construct
  REGION 1..1049: note = variant of P450 oxidase from Bacillus megaterium
MTIKEMPQPKTFGELKNLPLLNTDKPVQALMRIADELGEIFKFEAPGSVTRYLSSQRLIKEACDESRFDKNLSQGLKFARDFVGDGLVTSWTHEPNWKKAHNILVPSFSQWAMGRYHAMMVDIAVQLVQKWERLNADEHIEVSEDMTRLTLDTIGLCLFNYRFNSFYRDTPHPFIVSVVRALDEVMNKLQRANPDDPAYDENKRQCQEDIKVMNDYVDKIIADRKNRGEQSHDLLTQMLNGKDPETGEPLDDGNIRQQIITFLIAGHQTTSGLLSFALYFLVKNPRVLQKVAEEAARVLVDPVPSYKQVKQLKYVGMVLNEALRLWPVAPMFSLYAKEDTVLGGEYPLTKGDEVMVLVPQLHRDKTIWGDDVEEFRPERFENPSAIPQHAFKPFGNGQRACIGQQFALHSATLVLGMMLKHFDFEDHTNYELVIKESRTLKPEGFVVKAKSKGIPLGGIPSPSTEQSAKKVRKKAENAHNTPLLVLYGSNAGTAEGTARDLADIAMSKGFAPQVATLDSHAGNLPREGAVLIVTASYNGHPPDNAKQFVDWLDQASADEVKGVRYSVFGCGDKNWAGTYQKVPAFIDETLAAKGAENIAKRGEADASDDFEGAYEEWRDHMWSDVAAYFGLDIENSEDNKSTLSLQFVDSAADMPLAKMHGAFSTNVVASKELQQPGSARSTRHLEIELPKEASYQEGDHLGVIPRYYEGIVNRVTQRFGLSASQLIRLEAEEEKLAHLPLAKTVSVEELLQYVELQDPVTRTQLRAMAAKTVCPPHKVELEALLGKQAYKEQVLAKRLTMLELLEKYPACEMSFSEFIALLPSIRPRYYSISSSPRVDLKQASITVSVVSGLAWSGYGEYKGIASNYLAELQEGDTITCFISTPQSEFTLPKDPETPLIMVGPGTGVAPFRGFVQARKQLKEQGQSLGEAHLYFGCRSPHEDYLYQEELENAQSEGIILLHTAFSRMSNQPKTYVQHVMEQDGKKLIELLDQGAHFYICGDGIQMAPAVEATLMKSYADVHQVSEADARLWLQQLEEKGRYAKDVWLG

SEQ ID NO: 1147 - DNA, 3147 bp, synthetic construct
  misc_feature 1..3147: note = variant of P450 oxidase from Bacillus megaterium
  source 1..3147: mol_type = other DNA
atgacaattaaggaaatgcctcagcctaagacgtttggagaacttaaaaatttaccgttattaaatacagataaaccggttcaagctttgatgcgtattgcggatgaattaggagaaatctttaaattcgaggcacctggtagcgtaacgcgctatttatcaagtcagcgtctaattaaagaagcatgcgatgaatcacgctttgataaaaacttaagtcaagggcttaaatttgcacgtgattttgttggagacgggctggttacaagctggacgcatgaaccgaattggaaaaaagcgcataatatcttagttccaagctttagtcagcatgcaatggggcgttatcatgcgatgatggtcgatatcgccgtgcagatggttcaaaagtgggagcgtctaaatgcagatgagcatattgaagtatcggaagacatgacacgtttaacgcttgatacaattggtctttgcctgtttaactatcgctttaacagcttttaccgagatacgcctcatccatttattgtgagtgtggttcgtgcactggatgaagtaatgaacaagctgcagcgagcaaatccagacgacccagcttatgatgaaaacaagcgccagtgtcaagaagatatcaaggtgatgaacgactatgtagataaaattattgcagatcgcaaagcaaggggtgaacaaagtcatgatttattaacgcagatgctaaacggaaaagatccagaaacgggtgagccgcttgatgacgggaacattcgtcagcaaattattacattcttaattgcgggacaccaaacgacaagtggtcttttatcatttgcgctgtatttcttagtgaaaaatccacgtgtattacaaaaagtagcagaagaagcagcacgagttctagtagatcctgttccaagctacaaacaagtcaaacagcttaaatatgttggcatggtcttaaacgaagcgctgcgcttatggccagtagcgcctatgttttccctatatgcaaaagaagatacggtgcttggaggagaatatgaattaacgaaaggcgacgaagtaatggttctggtgcctcagcttcaccgtgataaaacaatttggggagacgatgtggaggagttccgtccagagcgttttgaaaatccaagtgcgattccgcagcatgcgtttaaaccgtttggaaacggtcagcgtgcgtgtatcggtcagcagttcgctcttcatagtgcaacgctggtacttggtatgatgctaaaacactttgactttgaagatcatacaaactacgagctcgttattaaagaatcgcggacgttaaaacctgaaggctttgtggtaaaagcaaaatcgaaaggcattccgcttggcggtattccttcacctagcactgaacagtctgctaaaaaagtacgcaaaaaggcagaaaacgctcataatacgccgctgcttgtgctatacggttcaaatgcgggaacagctgaaggaacggcgcgtgatttagcagatattgcaatgagcaaaggatttgcaccgcaggtcgcaacgcttgattcacacgccggtaatcttccgcgcgaaggagctgtattaattgtaacggcgtcttataacggtcatccgcctgataacgcaaagcaatttgtcgattggttagaccaagcgtctgcggatgaagtaaaaggcgttcgctactccgtatttggatgcggcgataaaaattgggcggggacgtatcaaaaagtgcctgcttttatcgatgaaacgcttgccgctaaaggggcagaaaacatcgctaagcgcggtgaagcagatgcaagcgacgactttgaaggcgcgtatgaagaatggcgtgatcatatgtggagtgacgtagcagcctactttggtctcgacattgaaaacagtgaagataataaatctactctttcacttcaatttgtcgacagcgcggcggatatgcctcttgcgaaaatgcacggtgcgttttcaacgaacgtcgtagcaagcaaagaacttcaacagcctggcagtgcacgaagcacgcgacatcttgaaattgaacttccaaaagaagcttcttatcaagaaggagatcatttaggtgttattcctcgctattatgaaggaatagtaaaccgtgtaacacagaggttcggcctaagcgcatcacagctgatccgtctggaagcagaagaagaaaaattagctcatttgccactcgctaaaacagtatccgtagaagagcttctgcaatacgtggagcttcaagatcctgttacgcgcacgcagcttcgcgcaatggctgctaaaacggtctgcccgccgcataaagtagagcttgaagccttgcttggcaagcaagcctacaaagaacaagtgctggcaaaacgtttaacaatgcttgaactgcttgaaaaatacccggcgtgtgaaatgagtttcagcgaatttatcgcccttctgccaagcatacgcccgcgctattactcgatttcttcatcacctcgtgtcgatctgaaacaagcaagcatcacggtcagcgttgtcagtggaccggcgtggagcggatatggagaatataaaggaattgcgtcgaactatcttgctgagctgcaagaaggagatacgattacgtgctttatttccacaccgcagtcagagtttacgctgccaaaagaccctgaaacgccgcttatcatggtcggaccgggaacaggcgtcgcgccgtttagaggctttgtgcaggcgcgcaaacagctaaaagaacaaggacagtcacttggagaagcacatttatacttcggctgccgttcacctcatgaagactatctgtatcaagaagagcttgaaaacgcccaaagcgaaggcatcattctgcttcataccgctttttctcgcatgccgaatcagccgaaaacatacgttcagcacgtaatggaacaagacggcaagaaattgattgaacttcttgatcaaggagcgcacttctatatttgcggagacggaattcaaatggcacctgccgttgaagcaacgcttatgaaaagctatgctgacgttcaccaagtgagtgaagcagacgctcgcttatggctgcagcagctagaagaaaaaggccgatacgcaaaagacgtgtggctgggg

SEQ ID NO: 1148 - protein, 1049 aa, synthetic construct
  REGION 1..1049: note = variant of P450 oxidase from Bacillus megaterium
MTIKEMPQPKTFGELKNLPLLNTDKPVQALMRIADELGEIFKFEAPGSVTRYLSSQRLIKEACDESRFDKNLSQGLKFARDFVGDGLVTSWTHEPNWKKAHNILVPSFSQHAMGRYHAMMVDIAVQMVQKWERLNADEHIEVSEDMTRLTLDTIGLCLFNYRFNSFYRDTPHPFIVSVVRALDEVMNKLQRANPDDPAYDENKRQCQEDIKVMNDYVDKIIADRKARGEQSHDLLTQMLNGKDPETGEPLDDGNIRQQIITFLIAGHQTTSGLLSFALYFLVKNPRVLQKVAEEAARVLVDPVPSYKQVKQLKYVGMVLNEALRLWPVAPMFSLYAKEDTVLGGEYELTKGDEVMVLVPQLHRDKTIWGDDVEEFRPERFENPSAIPQHAFKPFGNGQRACIGQQFALHSATLVLGMMLKHFDFEDHTNYELVIKESRTLKPEGFVVKAKSKGIPLGGIPSPSTEQSAKKVRKKAENAHNTPLLVLYGSNAGTAEGTARDLADIAMSKGFAPQVATLDSHAGNLPREGAVLIVTASYNGHPPDNAKQFVDWLDQASADEVKGVRYSVFGCGDKNWAGTYQKVPAFIDETLAAKGAENIAKRGEADASDDFEGAYEEWRDHMWSDVAAYFGLDIENSEDNKSTLSLQFVDSAADMPLAKMHGAFSTNVVASKELQQPGSARSTRHLEIELPKEASYQEGDHLGVIPRYYEGIVNRVTQRFGLSASQLIRLEAEEEKLAHLPLAKTVSVEELLQYVELQDPVTRTQLRAMAAKTVCPPHKVELEALLGKQAYKEQVLAKRLTMLELLEKYPACEMSFSEFIALLPSIRPRYYSISSSPRVDLKQASITVSVVSGPAWSGYGEYKGIASNYLAELQEGDTITCFISTPQSEFTLPKDPETPLIMVGPGTGVAPFRGFVQARKQLKEQGQSLGEAHLYFGCRSPHEDYLYQEELENAQSEGIILLHTAFSRMPNQPKTYVQHVMEQDGKKLIELLDQGAHFYICGDGIQMAPAVEATLMKSYADVHQVSEADARLWLQQLEEKGRYAKDVWLG

SEQ ID NO: 1149 - DNA, 3147 bp, synthetic construct
  misc_feature 1..3147: note = variant of P450 oxidase from Bacillus megaterium
  source 1..3147: mol_type = other DNA
atgacaattaaggaaatgcctcagcctaagacgtttggagaacttaaaaatttaccgttattaaatacagataaaccggttcaagctttgatgcgtattgcggatgaattaggagaaatctttaaattcgaggcacctggtagcgtaacgcgctatttatcaagtcagcgtctaattaaagaagcatgcgatgaatcacgctttgataaaaacttaagtcaagggcttaaatttgcacgtgattttgttggagacgggctggttacaagctggacgcatgaaccgaattggaaaaaagcgcataatatcttagttccaagctttagtcagcgcgcaatggggcgttatcatgcgatgatggtcgatatcgccgtgcagcttgttcaaaagtgggagcgtctaaatgcagatgagcatattgaagtatcggaagacatgacacgtttaacgcttgatacaattggtctttgcctgtttaactatcgctttaacagcttttaccgagatacgcctcatccatttattgtgagtgtggttcgtgcactggatgaagtaatgaacaagctgcagcgagcaaatccagacgacccagcttatgatgaaaacaagcgccagtgtcaagaagatatcaaggtgatgaacgactatgtagataaaattattgcagatcgcaaagcaaggggtgaacaaagtcatgatttattaacgcagatgctaaacggaaaagatccagaaacgggtgagccgcttgatgacgggaatattcgtcagcaaattattacattcttaattgcgggacaccaaacgacaagtggtcttttatcatttgcgctgtatttcttagtgaaaaatccacgtgtattacaaaaagtagcagaagaagcagcacgagttctagtagatcctgttccaagctacaaacaagtcaaacagcttaaatatgttggcatggtcttaaacgaagcgctgcgcttatggccagtagcgcctatgttttccctatatgcaaaagaagatacggtgcttggaggagaatatccgttaacgaaaggcgacgaagtaatggttctggtgcctcagcttcaccgtgataaaacaatttggggagacgatgtggaggagttccgtccagagcgttttgaaaatccaagtgcgattccgcagcatgcgtttaaaccgtttggaaacggtcagcgtgcgtgtatcggtcagcagttcgctcttcatagtgcaacgctggtacttggtatgatgctaaaacactttgactttgaagatcatacaaactacgagctcgttattaaagaatcgcggacgttaaaacctgaaggctttgtggtaaaagcaaaatcgaaaggcattccgcttggcggtattccttcacctagcactgaacagtctgctaaaaaagtacgcaaaaaggcagaaaacgctcataatacgccgctgcttgtgctatacggttcaaatgcgggaacagctgaaggaacggcgcgtgatttagcagatattgcaatgagcaaaggatttgcaccgcaggtcgcaacgcttgattcacacgccggtaatcttccgcgcgaaggagctgtattaattgtaacggcgtcttataacggtcatccgcctgataacgcaaagcaatttgtcgattggttagaccaagcgtctgcggatgaagtaaaaggcgttcgctactccgtatttggatgcggcgataaaaattgggcggggacgtatcaaaaagtgcctgcttttatcgatgaaacgcttgccgctaaaggggcagaaaacatcgctaagcgcggtgaagcagatgcaagcgacgactttgaaggcgcgtatgaagaatggcgtgatcatatgtggagtgacgtagcagcctactttggtctcgacattgaaaacagtgaagataataaatctactctttcacttcaatttgtcgacagcgcggcggatatgcctcttgcgaaaatgcacggtgcgttttcaacgaacgtcgtagcaagcaaagaacttcaacagcctggcagtgcacgaagcacgcgacatcttgaaattgaacttccaaaagaagcttcttatcaagaaggagatcatttaggtgttattcctcgctattatgaaggaatagtaaaccgtgtaacacagaggttcggcctaagcgcatcacagctgatccgtctggaagcagaagaagaaaaattagctcatttgccactcgctaaaacagtatccgtagaagagcttctgcaatacgtggagcttcaagatcctgttacgcgcacgcagcttcgcgcaatggctgctaaaacggtctgcccgccgcataaagtagagcttgaagccttgcttggcaagcaagcctacaaagaacaagtgctggcaaaacgtttaacaatgcttgaactgcttgaaaaatacccggcgtgtgaaatgagtttcagcgaatttatcgcccttctgccaagcatacgcccgcgctattactcgatttcttcatcacctcgtgtcgatctgaaacaagcaagcatcacggtcagcgttgtcagtggactggcgtggagcggatatggagaatataaaggaattgcgtcgaactatcttgctgagctgcaagaaggagatacgattacgtgctttatttccacaccgcagtcagagtttacgctgccaaaagaccctgaaacgccgcttatcatggtcggaccgggaacaggcgtcgcgccgtttagaggctttgtgcaggcgcgcaaacagctaaaagaacaaggacagtcacttggagaagcacatttatacttcggctgccgttcacctcatgaagactatctgtatcaagaagagcttgaaaacgcccaaagcgaaggcatcattctgcttcataccgctttttctcgcatgccgaatcagccgaaaacatacgttcagcacgtaatggaacaagacggcaagaaattgattgaacttcttgatcaaggagcgcacttctatatttgcggagacggaattcaaatggcacctgccgttgaagcaacgcttatgaaaagctatgctgacgttcaccaagtgagtgaagcagacgctcgcttatggctgcagcagctagaagaaaaaggccgatacgcaaaagacgtgtggctgggg

SEQ ID NO: 1150 - protein, 1049 aa, synthetic construct
  REGION 1..1049: note = variant of P450 oxidase from Bacillus megaterium
MTIKEMPQPKTFGELKNLPLLNTDKPVQALMRIADELGEIFKFEAPGSVTRYLSSQRLIKEACDESRFDKNLSQGLKFARDFVGDGLVTSWTHEPNWKKAHNILVPSFSQRAMGRYHAMMVDIAVQLVQKWERLNADEHIEVSEDMTRLTLDTIGLCLFNYRFNSFYRDTPHPFIVSVVRALDEVMNKLQRANPDDPAYDENKRQCQEDIKVMNDYVDKIIADRKARGEQSHDLLTQMLNGKDPETGEPLDDGNIRQQIITFLIAGHQTTSGLLSFALYFLVKNPRVLQKVAEEAARVLVDPVPSYKQVKQLKYVGMVLNEALRLWPVAPMFSLYAKEDTVLGGEYPLTKGDEVMVLVPQLHRDKTIWGDDVEEFRPERFENPSAIPQHAFKPFGNGQRACIGQQFALHSATLVLGMMLKHFDFEDHTNYELVIKESRTLKPEGFVVKAKSKGIPLGGIPSPSTEQSAKKVRKKAENAHNTPLLVLYGSNAGTAEGTARDLADIAMSKGFAPQVATLDSHAGNLPREGAVLIVTASYNGHPPDNAKQFVDWLDQASADEVKGVRYSVFGCGDKNWAGTYQKVPAFIDETLAAKGAENIAKRGEADASDDFEGAYEEWRDHMWSDVAAYFGLDIENSEDNKSTLSLQFVDSAADMPLAKMHGAFSTNVVASKELQQPGSARSTRHLEIELPKEASYQEGDHLGVIPRYYEGIVNRVTQRFGLSASQLIRLEAEEEKLAHLPLAKTVSVEELLQYVELQDPVTRTQLRAMAAKTVCPPHKVELEALLGKQAYKEQVLAKRLTMLELLEKYPACEMSFSEFIALLPSIRPRYYSISSSPRVDLKQASITVSVVSGLAWSGYGEYKGIASNYLAELQEGDTITCFISTPQSEFTLPKDPETPLIMVGPGTGVAPFRGFVQARKQLKEQGQSLGEAHLYFGCRSPHEDYLYQEELENAQSEGIILLHTAFSRMPNQPKTYVQHVMEQDGKKLIELLDQGAHFYICGDGIQMAPAVEATLMKSYADVHQVSEADARLWLQQLEEKGRYAKDVWLG

SEQ ID NO: 1151 - DNA, 3147 bp, synthetic construct
  misc_feature 1..3147: note = variant of P450 oxidase from Bacillus megaterium
  source 1..3147: mol_type = other DNA
atgacaattaaggaaatgcctcagcctaagacgtttggagaacttaaaaatttaccgttattaaatacagataaaccggttcaagctttgatgcgtattgcggatgaattaggagaaatctttaaattcgaggcgcctggtagcgtaacgcgctatttatcaagtcagcgtctaattaaagaagcatgcgatgaatcacgctttgataaaaacttaagtcaagggcttaaatttgcacgtgattttgttggagacgggctggttacaagctggacgcatgaaccgaattggaaaaaagcgcataatatcttagttccaagctttagtcagcatgcaatggggcgttatcatgcgatgatggtcgatatcgccgtgcagatggttcaaaagtgggagcgtctaaatgcagatgagcatattgaagtatcggaagacatgacacgtttaacgcttgatacaattggtctttgcctgtttaactatcgctttaacagcttttaccgagatacgcctcatccatttattgtgagtgtggttcgtgcactggatgaagtaatgaacaagctgcagcgagcaaatccagacgacccagcttatgatgaaaacaagcgccagtgtcaagaagataccaaggtgatgaacgactatgtagataaaattattgcagatcgcaaagcaaggggtgaacaaagtcatgatttattaacgcagatgctaaacggaaaagattatgaaacgggtgagccgcttgatgacgggaacattcgtcagcaaattattacattcttaattgcgggacaccaaacgacaagtggtcttttatcatttgcgctgtatttcttagtgaaaaatccacgtgtattacaaaaagtagcagaagaagcagcacgagttctagtagatcctgttccaagctacaaacaagtcaaacagcttaaatatgttggcatggtcttaaacgaagcgctgcgcttatggccagtagcgcctatgttttccctatatgcaaaagaagatacggtgcttggaggagaatatcctttaacgaaaggcgacgaagtaatggttctggtgcctcagcttcaccgtgataaaacaatttggggagacgatgtggaggagttccgtccagagcgttttgaaaatccaagtgcgattccgcagcatgcgtttaaaccgtttggaaacggtcagcgtgcgtgtatcggtcagcagttcgctcttcatagtgcaacgctggtacttggtatgatgctaaaacactttgactttgaagatcatacaaactacgagctcgttattaaagaatcgcggacgttaaaacctgaaggctttgtggtaaaagcaaaatcgaaaggcattccgcttggcggtattccttcacctagcactgaacagtctgctaaaaaagtacgcaaaaaggcagaaaacgctcataatacgccgctgcttgtgctatacggttcaaatgcgggaacagctgaaggaacggcgcgtgatttagcagatattgcaatgagcaaaggatttgcaccgcaggtcgcaacgcttgattcacacgccggtaatcttccgcgcgaaggagctgtattaattgtaacggcgtcttataacggtcatccgcctgataacgcaaagcaatttgtcgattggttagaccaagcgtctgcggatgaagtaaaaggcgttcgctactccgtatttggatgcggcgataaaaattgggcggggacgtatcaaaaagtgcctgcttttatcgatgaaacgcttgccgctaaaggggcagaaaacatcgctaagcgcggtgaagcagatgcaagcgacgactttgaaggcgcgtatgaagaatggcgtgatcatatgtggagtgacgtagcagcctactttggtctcgacattgaaaacagtgaagataataaatctactctttcacttcaatttgtcgacagcgcggcggatatgcctcttgcgaaaatgcacggtgcgttttcaacgaacgtcgtagcaagcaaagaacttcaacagcctggcagtgcacgaagcacgcgacatcttgaaattgaacttccaaaagaagcttcttatcaagaaggagatcatttaggtgttattcctcgctattatgaaggaatagtaaaccgtgtaacacagaggttcggcctaagcgcatcacagctgatccgtctggaagcagaagaagaaaaattagctcatttgccactcgctaaaacagtatccgtagaagagcttctgcaatacgtggagcttcaagatcctgttacgcgcacgcagcttcgcgcaatggctgctaaaacggtctgcccgccgcataaagtagagcttgaagccttgcttggcaagcaagcctacaaagaacaagtgctggcaaaacgtttaacaatgcttgaactgcttgaaaaatacccggcgtgtgaaatgagtttcagcgaatttatcgcccttctgccaagcatacgcccgcgctattactcgatttcttcatcacctcgtgtcgatctgaaacaagcaagcatcacggtcagcgttgtcagtggactggcgtggagcggatatggagaatataaaggaattgcgtcgaactatcttgctgagctgcaagaaggagatacgattacgtgctttatttccacaccgcagtcagagtttacgctgccaaaagaccctgaaacgccgcttatcatggtcggaccgggaacaggcgtcgcgccgtttagaggctttgtgcaggcgcgcaaacagctaaaagaacaaggacagtcacttggagaagcacatttatacttcggctgccgttcacctcatgaagactatctgtatcaagaagagcttgaaaacgcccaaagcgaaggcatcattctgcttcataccgctttttctcgcatgccgaatcagccgaaaacatacgttcagcacgtaatggaacaagacggcaagaaattgattgaacttcttgatcaaggagcgcacttctatatttgcggagacggaattcaaatggcacctgccgttgaagcaacgcttatgaaaagctatgctgacgttcaccaagtgagtgaagcagacgctcgcttatggctgcagcagctagaagaaaaaggccgatacgcaaaagacgtgtggctgggg

SEQ ID NO: 1152 - protein, 1049 aa, synthetic construct
  REGION 1..1049: note = variant of P450 oxidase from Bacillus megaterium
MTIKEMPQPKTFGELKNLPLLNTDKPVQALMRIADELGEIFKFEAPGSVTRYLSSQRLIKEACDESRFDKNLSQGLKFARDFVGDGLVTSWTHEPNWKKAHNILVPSFSQHAMGRYHAMMVDIAVQMVQKWERLNADEHIEVSEDMTRLTLDTIGLCLFNYRFNSFYRDTPHPFIVSVVRALDEVMNKLQRANPDDPAYDENKRQCQEDTKVMNDYVDKIIADRKARGEQSHDLLTQMLNGKDYETGEPLDDGNIRQQIITFLIAGHQTTSGLLSFALYFLVKNPRVLQKVAEEAARVLVDPVPSYKQVKQLKYVGMVLNEALRLWPVAPMFSLYAKEDTVLGGEYPLTKGDEVMVLVPQLHRDKTIWGDDVEEFRPERFENPSAIPQHAFKPFGNGQRACIGQQFALHSATLVLGMMLKHFDFEDHTNYELVIKESRTLKPEGFVVKAKSKGIPLGGIPSPSTEQSAKKVRKKAENAHNTPLLVLYGSNAGTAEGTARDLADIAMSKGFAPQVATLDSHAGNLPREGAVLIVTASYNGHPPDNAKQFVDWLDQASADEVKGVRYSVFGCGDKNWAGTYQKVPAFIDETLAAKGAENIAKRGEADASDDFEGAYEEWRDHMWSDVAAYFGLDIENSEDNKSTLSLQFVDSAADMPLAKMHGAFSTNVVASKELQQPGSARSTRHLEIELPKEASYQEGDHLGVIPRYYEGIVNRVTQRFGLSASQLIRLEAEEEKLAHLPLAKTVSVEELLQYVELQDPVTRTQLRAMAAKTVCPPHKVELEALLGKQAYKEQVLAKRLTMLELLEKYPACEMSFSEFIALLPSIRPRYYSISSSPRVDLKQASITVSVVSGLAWSGYGEYKGIASNYLAELQEGDTITCFISTPQSEFTLPKDPETPLIMVGPGTGVAPFRGFVQARKQLKEQGQSLGEAHLYFGCRSPHEDYLYQEELENAQSEGIILLHTAFSRMPNQPKTYVQHVMEQDGKKLIELLDQGAHFYICGDGIQMAPAVEATLMKSYADVHQVSEADARLWLQQLEEKGRYAKDVWLG

SEQ ID NO: 1153 - DNA, 3147 bp, synthetic construct
  misc_feature 1..3147: note = variant of P450 oxidase from Bacillus megaterium
  source 1..3147: mol_type = other DNA
atgacaattaaggaaatgcctcagcctaagacgtttggagaacttaaaaatttaccgttattaaatacagataaaccggttcaagctttgatgcgtattgcggatgaattaggagaaatctttaaattcgaggaacctggtagcgtaacgcgctatttatcaagtcagcgtctaattaaagaagcatgcgatgaatcacgctttgataaaaacttaagtcaagggcttaaatttgcacgtgattttgttggagacgggctggttacaagctggacgcatgaaccgaattggaaaaaagcgcataatatcttagttccaagctttagtcagcatgcaatggggcgttatcatgcgatgatggtcgatatcgccgtgcagctggttcaaaagtgggagcgtctaaatgcagatgagcatattgaagtatcggaagacatgacacgtttaacgcttgatacaattggtctttgcctgtttaactatcgctttaacagcttttaccgagatacgcctcatccatttattgtgagtgtggttcgtgcactggatgaagtaatgaacaagctgcagcgagcaaatccagacgacccagcttatgatgaaaacaagcgccagtgtcaagaagatatcaaggtgatgaacgactatgtagataaaattattgcagatcgcaaagcaaggggtgaacaaagtcatgatttattaacgcagatgctaaacggaaaagatccagaaacgggtgagccgcttgatgacgggaacattcgtcagcaaattattacattcttaattgcgggacaccaaacgacaagtggtcttttatcatttgcgctgtatttcttagtgaaaaatccacgtgtattacaaaaagtagcagaagaagcagcacgagttctagtagatcctgttccaagctacaaacaagtcaaacagcttaaatatgttggcatggtcttaaacgaagcgctgcgcttatggccagtagcgcctatgttttccctatatgcaaaagaagatacggtgcttggaggagaatatcctttaacgaaaggcgacgaagtaatggttctggtgcctcagcttcaccgtgataaaacaatttggggagacgatgtggaggagttccgtccagagcgttttgaaaatccaagtgcgattccgcagcatgcgtttaaaccgtttggaaacggtcagcgtgcgtgtatcggtcagcagttcgctcttcatagtgcaacgctggtacttggtatgatgctaaaacactttgactttgaagatcatacaaactacgagctcgttattaaagaatcgcggacgttaaaacctgaaggctttgtggtaaaagcaaaatcgaaaggcattccgcttggcggtattccttcacctagcactgaacagtctgctaaaaaagtacgcaaaaaggcagaaaacgctcataatacgccgctgcttgtgctatacggttcaaatgcgggaacagctgaaggaacggcgcgtgatttagcagatattgcaatgagcaaaggatttgcaccgcaggtcgcaacgcttgattcacacgccggtaatcttccgcgcgaaggagctgtattaattgtaacggcgtcttataacggtcatccgcctgataacgcaaagcaatttgtcgattggttagaccaagcgtctgcggatgaagtaaaaggcgttcgctactccgtatttggatgcggcgataaaaattgggcggggacgtatcaaaaagtgcctgcttttatcgatgaaacgcttgccgctaaaggggcagaaaacatcgctaagcgcggtgaagcagatgcaagcgacgactttgaaggcgcgtatgaagaatggcgtgatcatatgtggagtgacgtagcagcctactttggtctcgacattgaaaacagtgaagataataaatctactctttcacttcaatttgtcgacagcgcggcggatatgcctcttgcgaaaatgcacggtgcgttttcaacgaacgtcgtagcaagcaaagaacttcaacagcctggcagtgcacgaagcacgcgacatcttgaaattgaacttccaaaagaagcttcttatcaagaaggagatcatttaggtgttattcctcgctattatgaaggaatagtaaaccgtgtaacacagaggttcggcctaagcgcatcacagctgatccgtctggaagcagaagaagaaaaattagctcatttgccactcgctaaaacagtatccgtagaagagcttctgcaatacgtggagcttcaagatcctgttacgcgcacgcagcttcgcgcaatggctgctaaaacggtctgcccgccgcataaagtagagcttgaagccttgcttggcaagcaagcctacaaagaacaagtgctggcaaaacgtttaacaatgcttgaactgcttgaaaaatacccggcgtgtgaaatgagtttcagcgaatttatcgcccttctgccaagcatacgcccgcgctattactcgatttcttcatcacctcgtgtcgatctgaaacaagcaagcatcacggtcagcgttgtcagcggaccggcgtggagcggatatggagaatataaaggaattgcgtcgaactatcttgctgagctgcaagaaggagatacgattacgtgctttatttccacaccgcagtcagagtttacgctgccaaaagaccctgaaacgccgcttatcatggtcggaccgggaacaggcgtcgcgccgtttagaggctttgtgcaggcgcgcaaacagctaaaagaacaaggacagtcacttggagaagcacatttatacttcggctgccgttcacctcatgaagactatctgtatcaagaagagcttgaaaacgcccaaagcgaaggcatcattctgcttcataccgctttttctcgcatgccgaatcagccgaaaacatacgttcagcacgtaatggaacaagacggcaagaaattgattgaacttcttgatcaaggagcgcacttctatatttgcggagacggaattcaaatggcacctgccgttgaagcaacgcttatgaaaagctatgctgacgttcaccaagtgagtgaagcagacgctcgcttatggctgcagcagctagaagaaaaaggccgatacgcaaaagacgtgtggctgggg

SEQ ID NO: 1154 - protein, 1049 aa, synthetic construct
  REGION 1..1049: note = variant of P450 oxidase from Bacillus megaterium
MTIKEMPQPKTFGELKNLPLLNTDKPVQALMRIADELGEIFKFEEPGSVTRYLSSQRLIKEACDESRFDKNLSQGLKFARDFVGDGLVTSWTHEPNWKKAHNILVPSFSQHAMGRYHAMMVDIAVQLVQKWERLNADEHIEVSEDMTRLTLDTIGLCLFNYRFNSFYRDTPHPFIVSVVRALDEVMNKLQRANPDDPAYDENKRQCQEDIKVMNDYVDKIIADRKARGEQSHDLLTQMLNGKDPETGEPLDDGNIRQQIITFLIAGHQTTSGLLSFALYFLVKNPRVLQKVAEEAARVLVDPVPSYKQVKQLKYVGMVLNEALRLWPVAPMFSLYAKEDTVLGGEYPLTKGDEVMVLVPQLHRDKTIWGDDVEEFRPERFENPSAIPQHAFKPFGNGQRACIGQQFALHSATLVLGMMLKHFDFEDHTNYELVIKESRTLKPEGFVVKAKSKGIPLGGIPSPSTEQSAKKVRKKAENAHNTPLLVLYGSNAGTAEGTARDLADIAMSKGFAPQVATLDSHAGNLPREGAVLIVTASYNGHPPDNAKQFVDWLDQASADEVKGVRYSVFGCGDKNWAGTYQKVPAFIDETLAAKGAENIAKRGEADASDDFEGAYEEWRDHMWSDVAAYFGLDIENSEDNKSTLSLQFVDSAADMPLAKMHGAFSTNVVASKELQQPGSARSTRHLEIELPKEASYQEGDHLGVIPRYYEGIVNRVTQRFGLSASQLIRLEAEEEKLAHLPLAKTVSVEELLQYVELQDPVTRTQLRAMAAKTVCPPHKVELEALLGKQAYKEQVLAKRLTMLELLEKYPACEMSFSEFIALLPSIRPRYYSISSSPRVDLKQASITVSVVSGPAWSGYGEYKGIASNYLAELQEGDTITCFISTPQSEFTLPKDPETPLIMVGPGTGVAPFRGFVQARKQLKEQGQSLGEAHLYFGCRSPHEDYLYQEELENAQSEGIILLHTAFSRMPNQPKTYVQHVMEQDGKKLIELLDQGAHFYICGDGIQMAPAVEATLMKSYADVHQVSEADARLWLQQLEEKGRYAKDVWLG

SEQ ID NO: 1155 - DNA, 3147 bp, synthetic construct
  misc_feature 1..3147: note = variant of P450 oxidase from Bacillus megaterium
  source 1..3147: mol_type = other DNA
atgacaattaaggaaatgcctcagcctaagacgtttggagaacttaaaaatttaccgttattaaatacagataaaccggttcaagctttgatgcgtattgcggatgaattaggagaaatctttaaattcgaggcgcctggtagcgtaacgcgctatttatcaagtcagcgtctaattaaagaagcatgcgatgaatcacgctttgataaaaacttaagtcaagggcttaaatttgcacgtgattttgttggagacgggctggttacaagctggacgcatgaaccgaattggaaaaaagcgcataatatcttagttccaagctttagtcagcatgcaatggggcgttatcatgcgatgatggtcgatatcgccgtgcagatggttcaaaagtgggagcgtctaaatgcagatgagcatattgaagtatcggaagacatgacacgtttaacgcttgatacaattggtctttgcctgtttaactatcgctttaacagcttttaccgagatacgcctcatccatttattgtgagtgtggttcgtgcactggatgaagtaatgaacaagctgcagcgagcaaatccagacgacccagcttatgatgaaaacaagcgccagtgtcaagaagataccaaggtgatgaacgactatgtagataaaattattgcagatcgcaaagcaaggggtgaacaaagtcatgatttattaacgcagatgctaaacggaaaagattatgaaacgggtgagccgcttgatgacgggaacattcgtcagcaaattattacattcttaattgcgggacaccaaacgacaagtggtcttttatcatttgcgctgtatttcttagtgaaaaatccacgtgtattacaaaaagtagcagaagaagcagcacgagttctagtagatcctgttccaagctacaaacaagtcaaacagcttaaatatgttggcatggtcttaaacgaagcgctgcgcttatggccagtagcgcctatgttttccctatatgcaaaagaagatacggtgcttggaggagaatatcctttaacgaaaggcgacgaagtaatggttctggtgcctcagcttcaccgtgataaaacaatttggggagacgatgtggaggagttccgtccagagcgttttgaaaatccaagtgcgattccgcagcatgcgtttaaaccgtttggaaacggtcagcgtgcgtgtatcggtcagcagttcgctcttcatagtgcaacgctggtacttggtatgatgctaaaacactttgactttgaagatcatacaaactacgagctcgttattaaagaatcgcggacgttaaaacctgaaggctttgtggtaaaagcaaaatcgaaaggcattccgcttggcggtattccttcacctagcactgaacagtctgctaaaaaagtacgcaaaaaggcagaaaacgctcataatacgccgctgcttgtgctatacggttcaaatgcgggaacagctgaaggaacggcgcgtgatttagcagatattgcaatgagcaaaggatttgcaccgcaggtcgcaacgcttgattcacacgccggtaatcttccgcgcgaaggagctgtattaattgtaacggcgtcttataacggtcatccgcctgataacgcaaagcaatttgtcgattggttagaccaagcgtctgcggatgaagtaaaaggcgttcgctactccgtatttggatgcggcgataaaaattgggcggggacgtatcaaaaagtgcctgcttttatcgatgaaacgcttgccgctaaaggggcagaaaacatcgctaagcgcggtgaagcagatgcaagcgacgactttgaaggcgcgtatgaagaatggcgtgatcatatgtggagtgacgtagcagcctactttggtctcgacattgaaaacagtgaagataataaatctactctttcacttcaatttgtcgacagcgcggcggatatgcctcttgcgaaaatgcacggtgcgttttcaacgaacgtcgtagcaagcaaagaacttcaacagcctggcagtgcacgaagcacgcgacatcttgaaattgaacttccaaaagaagcttcttatcaagaaggagatcatttaggtgttattcctcgctattatgaaggaatagtaaaccgtgtaacacagaggttcggcctaagcgcatcacagctgatccgtctggaagcagaagaagaaaaattagctcatttgccactcgctaaaacagtatccgtagaagagcttctgcaatacgtggagcttcaagatcctgttacgcgcacgcagcttcgcgcaatggctgctaaaacggtctgcccgccgcataaagtagagcttgaagccttgcttggcaagcaagcctacaaagaacaagtgctggcaaaacgtttaacaatgcttgaactgcttgaaaaatacccggcgtgtgaaatgagtttcagcgaatttatcgcccttctgccaagcatacgcccgcgctattactcgatttcttcatcacctcgtgtcgatctgaaacaagcaagcatcacggtcagcgttgtcagtggaccggcgtggagcggatatggagaatataaaggaattgcgtcgaactatcttgctgagctgcaagaaggagatacgattacgtgctttatttccacaccgcagtcagagtttacgctgccaaaagaccctgaaacgccgcttatcatggtcggaccgggaacaggcgtcgcgccgtttagaggctttgtgcaggcgcgcaaacagctaaaagaacaaggacagtcacttggagaagcacatttatacttcggctgccgttcacctcatgaagactatctgtatcaagaagagcttgaaaacgcccaaagcgaaggcatcattctgcttcataccgctttttctcgcatgccgaatcagccgaaaacatacgttcagcacgtaatggaacaagacggcaagaaattgattgaacttcttgatcaaggagcgcacttctatatttgcggagacggaattcaaatggcacctgccgttgaagcaacgcttatgaaaagctatgctgacgttcaccaagtgagtgaagcagacgctcgcttatggctgcagcagctagaagaaaaaggccgatacgcaaaagacgtgtggctgggg

SEQ ID NO: 1156 - protein, 1049 aa, synthetic construct
  REGION 1..1049: note = variant of P450 oxidase from Bacillus megaterium
MTIKEMPQPKTFGELKNLPLLNTDKPVQALMRIADELGEIFKFEAPGSVTRYLSSQRLIKEACDESRFDKNLSQGLKFARDFVGDGLVTSWTHEPNWKKAHNILVPSFSQHAMGRYHAMMVDIAVQMVQKWERLNADEHIEVSEDMTRLTLDTIGLCLFNYRFNSFYRDTPHPFIVSVVRALDEVMNKLQRANPDDPAYDENKRQCQEDTKVMNDYVDKIIADRKARGEQSHDLLTQMLNGKDYETGEPLDDGNIRQQIITFLIAGHQTTSGLLSFALYFLVKNPRVLQKVAEEAARVLVDPVPSYKQVKQLKYVGMVLNEALRLWPVAPMFSLYAKEDTVLGGEYPLTKGDEVMVLVPQLHRDKTIWGDDVEEFRPERFENPSAIPQHAFKPFGNGQRACIGQQFALHSATLVLGMMLKHFDFEDHTNYELVIKESRTLKPEGFVVKAKSKGIPLGGIPSPSTEQSAKKVRKKAENAHNTPLLVLYGSNAGTAEGTARDLADIAMSKGFAPQVATLDSHAGNLPREGAVLIVTASYNGHPPDNAKQFVDWLDQASADEVKGVRYSVFGCGDKNWAGTYQKVPAFIDETLAAKGAENIAKRGEADASDDFEGAYEEWRDHMWSDVAAYFGLDIENSEDNKSTLSLQFVDSAADMPLAKMHGAFSTNVVASKELQQPGSARSTRHLEIELPKEASYQEGDHLGVIPRYYEGIVNRVTQRFGLSASQLIRLEAEEEKLAHLPLAKTVSVEELLQYVELQDPVTRTQLRAMAAKTVCPPHKVELEALLGKQAYKEQVLAKRLTMLELLEKYPACEMSFSEFIALLPSIRPRYYSISSSPRVDLKQASITVSVVSGPAWSGYGEYKGIASNYLAELQEGDTITCFISTPQSEFTLPKDPETPLIMVGPGTGVAPFRGFVQARKQLKEQGQSLGEAHLYFGCRSPHEDYLYQEELENAQSEGIILLHTAFSRMPNQPKTYVQHVMEQDGKKLIELLDQGAHFYICGDGIQMAPAVEATLMKSYADVHQVSEADARLWLQQLEEKGRYAKDVWLG

SEQ ID NO: 1157 - DNA, 3147 bp, synthetic construct
  misc_feature 1..3147: note = variant of P450 oxidase from Bacillus megaterium
  source 1..3147: mol_type = other DNA
atgacaattaaggaaatgcctcagcctaagacgtttggagaacttaaaaatttaccgttattaaatacagataaaccggttcaagctttgatgcgtattgcggatgaattaggagaaatctttaaattcgaggcacctggtagcgtaacgcgctatttatcaagtcagcgtctaattaaagaagcatgcgatgaatcacgctttgataaaaacttaagtcaagggcttaaatttgcacgtgattttgttggagacgggctggttacaagctggacgcatgaaccgaattggaaaaaagcgcataatatcttagttccaagctttagtcagcgcgcaatggggcgttatcatgcgatgatggtcgatatcgccgtgcagctggttcaaaagtgggagcgtctaaatgcagatgagcatattgaagtatcggaagacatgacacgtttaacgcttgatacaattggtctttgcctgtttaactatcgctttaacagcttttaccgagatacgcctcatccatttattgtgagtgtggttcgtgcactggatgaagtaatgaacaagctgcagcgagcaaatccagacgacccagcttatgatgaaaacaagcgccagtgtcaagaagatatcaaggtgatgaacgactatgtagataaaattattgcagatcgcaaaaacaggggtgaacaaagtcatgatttattaacgcagatgctaaacggaaaagattatgaaacgggtgagccgcttgatgacgggaatattcgtcagcaaattattacattcttaattgcgggacaccaaacgacaagtggtcttttatcatttgcgctgtatttcttagtgaaaaatccacgtgtattacaaaaagtagcagaagaagcagcacgagttctagtagatcctgttccaagctacaaacaagtcaaacagcttaaatatgttggcatggtcttaaacgaagcgctgcgcttatggccagtagcgcctatgttttccctatatgcaaaagaagatacggtgcttggaggagaatattcgttaacgaaaggcgacgaagtaatggttctggtgcctcagcttcaccgtgataaaacaatttggggagacgatgtggaggagttccgtccagagcgttttgaaaatccaagtgcgattccgcagcatgcgtttaaaccgtttggaaacggtcagcgtgcgtgtatcggtcagcagttcgctcttcatagtgcaacgctggtacttggtatgatgctaaaacactttgactttgaagatcatacaaactacgagctcgttattaaagaatcgcggacgttaaaacctgaaggctttgtggtaaaagcaaaatcgaaaggcattccgcttggcggtattccttcacctagcactgaacagtctgctaaaaaagtacgcaaaaaggcagaaaacgctcataatacgccgctgcttgtgctatacggttcaaatgcgggaacagctgaaggaacggcgcgtgatttagcagatattgcaatgagcaaaggatttgcaccgcaggtcgcaacgcttgattcacacgccggtaatcttccgcgcgaaggagctgtattaattgtaacggcgtcttataacggtcatccgcctgataacgcaaagcaatttgtcgattggttagaccaagcgtctgcggatgaagtaaaaggcgttcgctactccgtatttggatgcggcgataaaaattgggcggggacgtatcaaaaagtgcctgcttttatcgatgaaacgcttgccgctaaaggggcagaaaacatcgctaagcgcggtgaagcagatgcaagcgacgactttgaaggcgcgtatgaagaatggcgtgatcatatgtggagtgacgtagcagcctactttggtctcgacattgaaaacagtgaagataataaatctactctttcacttcaatttgtcgacagcgcggcggatatgcctcttgcgaaaatgcacggtgcgttttcaacgaacgtcgtagcaagcaaagaacttcaacagcctggcagtgcacgaagcacgcgacatcttgaaattgaacttccaaaagaagcttcttatcaagaaggagatcatttaggtgttattcctcgctattatgaaggaatagtaaaccgtgtaacacagaggttcggcctaagcgcatcacagctgatccgtctggaagcagaagaagaaaaattagctcatttgccactcgctaaaacagtatccgtagaagagcttctgcaatacgtggagcttcaagatcctgttacgcgcacgcagcttcgcgcaatggctgctaaaacggtctgcccgccgcataaagtagagcttgaagccttgcttggcaagcaagcctacaaagaacaagtgctggcaaaacgtttaacaatgcttgaactgcttgaaaaatacccggcgtgtgaaatgagtttcagcgaatttatcgcccttctgccaagcatacgcccgcgctattactcgatttcttcatcacctcgtgtcgatctgaaacaagcaagcatcacggtcagcgttgtcagtggaccggcgtggagcggatatggagaatataaaggaattgcgtcgaactatcttgctgagctgcaagaaggagatacgattacgtgctttatttccacaccgcagtcagagtttacgctgccaaaagaccctgaaacgccgcttatcatggtcggaccgggaacaggcgtcgcgccgtttagaggctttgtgcaggcgcgcaaacagctaaaagaacaaggacagtcacttggagaagcacatttatacttcggctgccgttcacctcatgaagactatctgtatcaagaagagcttgaaaacgcccaaagcgaaggcatcattctgcttcataccgctttttctcgcatgccgaatcagccgaaaacatacgttcagcacgtaatggaacaagacggcaagaaattgattgaacttcttgatcaaggagcgcacttctatatttgcggagacggaattcaaatggcacctgccgttgaagcaacgcttatgaaaagctatgctgacgttcaccaagtgagtgaagcagacgctcgcttatggctgcagcagctagaagaaaaaggccgatacgcaaaagacgtgtggctgggg

SEQ ID NO: 1158 - protein, 1049 aa, synthetic construct
  REGION 1..1049: note = variant of P450 oxidase from Bacillus megaterium
MTIKEMPQPKTFGELKNLPLLNTDKPVQALMRIADELGEIFKFEAPGSVTRYLSSQRLIKEACDESRFDKNLSQGLKFARDFVGDGLVTSWTHEPNWKKAHNILVPSFSQRAMGRYHAMMVDIAVQLVQKWERLNADEHIEVSEDMTRLTLDTIGLCLFNYRFNSFYRDTPHPFIVSVVRALDEVMNKLQRANPDDPAYDENKRQCQEDIKVMNDYVDKIIADRKNRGEQSHDLLTQMLNGKDYETGEPLDDGNIRQQIITFLIAGHQTTSGLLSFALYFLVKNPRVLQKVAEEAARVLVDPVPSYKQVKQLKYVGMVLNEALRLWPVAPMFSLYAKEDTVLGGEYSLTKGDEVMVLVPQLHRDKTIWGDDVEEFRPERFENPSAIPQHAFKPFGNGQRACIGQQFALHSATLVLGMMLKHFDFEDHTNYELVIKESRTLKPEGFVVKAKSKGIPLGGIPSPSTEQSAKKVRKKAENAHNTPLLVLYGSNAGTAEGTARDLADIAMSKGFAPQVATLDSHAGNLPREGAVLIVTASYNGHPPDNAKQFVDWLDQASADEVKGVRYSVFGCGDKNWAGTYQKVPAFIDETLAAKGAENIAKRGEADASDDFEGAYEEWRDHMWSDVAAYFGLDIENSEDNKSTLSLQFVDSAADMPLAKMHGAFSTNVVASKELQQPGSARSTRHLEIELPKEASYQEGDHLGVIPRYYEGIVNRVTQRFGLSASQLIRLEAEEEKLAHLPLAKTVSVEELLQYVELQDPVTRTQLRAMAAKTVCPPHKVELEALLGKQAYKEQVLAKRLTMLELLEKYPACEMSFSEFIALLPSIRPRYYSISSSPRVDLKQASITVSVVSGPAWSGYGEYKGIASNYLAELQEGDTITCFISTPQSEFTLPKDPETPLIMVGPGTGVAPFRGFVQARKQLKEQGQSLGEAHLYFGCRSPHEDYLYQEELENAQSEGIILLHTAFSRMPNQPKTYVQHVMEQDGKKLIELLDQGAHFYICGDGIQMAPAVEATLMKSYADVHQVSEADARLWLQQLEEKGRYAKDVWLG

SEQ ID NO: 1159 - DNA, 3147 bp, synthetic construct
  misc_feature 1..3147: note = variant of P450 oxidase from Bacillus megaterium
  source 1..3147: mol_type = other DNA
atgacaattaaggaaatgcctcagcctaagacgtttggagaacttaaaaatttaccgttattaaatacagataaaccggttcaagctttgatgcgtattgcggatgaattaggagaaatctttaaattcgaggcgcctggtagcgtaacgcgctatttatcaagtcagcgtctaattaaagaagcatgcgatgaatcacgctttgataaaaacttaagtcaagggcttaaatttgcacgtgattttgttggagacgggctggttacaagctggacgcatgaaccgaattggaaaaaagcgcataatatcttagttccaagctttagtcagcgcgcaatggggcgttatcatgcgatgatggtcgatatcgccgtgcagcttgttcaaaagtgggagcgtctaaatgcagatgagcatattgaagtatcggaagacatgacacgtttaacgcttgatacaattggtctttgcctgtttaactatcgctttaacagcttttaccgagatacgcctcatccatttattgtgagtgtggttcgtgcactggatgaagtaatgaacaagctgcagcgagcaaatccagacgacccagcttatgatgaaaacaagcgccagtgtcaagaagatatcaaggtgatgaacgactatgtagataaaattattgcagatcgcaaaaacaggggtgaacaaagtcatgatttattaacccagatgctaaacggaaaagatccagaaacgggtgagccgcttgatgacgggaatattcgtcagcaaattattacattcttaattgcgggacaccaaacgacaagtggtcttttatcatttgcgctgtatttcttagtgaaaaatccacgtgtattacaaaaagtagcagaagaagcagcacgagttctagtagatcctgttccaagctacaaacaagtcaaacagcttaaatatgttggcatggtcttaaacgaagcgctgcgcttatggccagtagcgcctatgttttccctatatgcaaaagaagatacggtgcttggaggagaatatcctttaacgaaaggcgacgaagtaatggttctggtgcctcagcttcaccgtgataaaacaatttggggagacgatgtggaggagttccgtccagagcgttttgaaaatccaagtgcgattccgcagcatgcgtttaaaccgtttggaaacggtcagcgtgcgtgtatcggtcagcagttcgctcttcatagtgcaacgctggtacttggtatgatgctaaaacactttgactttgaagatcatacaaactacgagctcgttattaaagaatcgcggacgttaaaacctgaaggctttgtggtaaaagcaaaatcgaaaggcattccgcttggcggtattccttcacctagcactgaacagtctgctaaaaaagtacgcaaaaaggcagaaaacgctcataatacgccgctgcttgtgctatacggttcaaatgcgggaacagctgaaggaacggcgcgtgatttagcagatattgcaatgagcaaaggatttgcaccgcaggtcgcaacgcttgattcacacgccggtaatcttccgcgcgaaggagctgtattaattgtaacggcgtcttataacggtcatccgcctgataacgcaaagcaatttgtcgattggttagaccaagcgtctgcggatgaagtaaaaggcgttcgctactccgtatttggatgcggcgataaaaattgggcggggacgtatcaaaaagtgcctgcttttatcgatgaaacgcttgccgctaaaggggcagaaaacatcgctaagcgcggtgaagcagatgcaagcgacgactttgaaggcgcgtatgaagaatggcgtgatcatatgtggagtgacgtagcagcctactttggtctcgacattgaaaacagtgaagataataaatctactctttcacttcaatttgtcgacagcgcggcggatatgcctcttgcgaaaatgcacggtgcgttttcaacgaacgtcgtagcaagcaaagaacttcaacagcctggcagtgcacgaagcacgcgacatcttgaaattgaacttccaaaagaagcttcttatcaagaaggagatcatttaggtgttattcctcgctattatgaaggaatagtaaaccgtgtaacacagaggttcggcctaagcgcatcacagctgatccgtctggaagcagaagaagaaaaattagctcatttgccactcgctaaaacagtatccgtagaagagcttctgcaatacgtggagcttcaagatcctgttacgcgcacgcagcttcgcgcaatggctgctaaaacggtctgcccgccgcataaagtagagcttgaagccttgcttggcaagcaagcctacaaagaacaagtgctggcaaaacgtttaacaatgcttgaactgcttgaaaaatacccggcgtgtgaaatgagtttcagcgaatttatcgcccttctgccaagcatacgcccgcgctattactcgatttcttcatcacctcgtgtcgatctgaaacaagcaagcatcacggtcagcgttgtcagcggaccggcgtggagcggatatggagaatataaaggaattgcgtcgaactatcttgctgagctgcaagaaggagatacgattacgtgctttatttccacaccgcagtcagagtttacgctgccaaaagaccctgaaacgccgcttatcatggtcggaccgggaacaggcgtcgcgccgtttagaggctttgtgcaggcgcgcaaacagctaaaagaacaaggacagtcacttggagaagcacatttatacttcggctgccgttcacctcatgaagactatctgtatcaagaagagcttgaaaacgcccaaagcgaaggcatcattctgcttcataccgctttttctcgcatgccgaatcagccgaaaacatacgttcagcacgtaatggaacaagacggcaagaaattgattgaacttcttgatcaaggagcgcacttctatatttgcggagacggaattcaaatggcacctgccgttgaagcaacgcttatgaaaagctatgctgacgttcaccaagtgagtgaagcagacgctcgcttatggctgcagcagctagaagaaaaaggccgatacgcaaaagacgtgtggctgggg

SEQ ID NO: 1160 - protein, 1049 aa, synthetic construct
  REGION 1..1049: note = variant of P450 oxidase from Bacillus megaterium
MTIKEMPQPKTFGELKNLPLLNTDKPVQALMRIADELGEIFKFEAPGSVTRYLSSQRLIKEACDESRFDKNLSQGLKFARDFVGDGLVTSWTHEPNWKKAHNILVPSFSQRAMGRYHAMMVDIAVQLVQKWERLNADEHIEVSEDMTRLTLDTIGLCLFNYRFNSFYRDTPHPFIVSVVRALDEVMNKLQRANPDDPAYDENKRQCQEDIKVMNDYVDKIIADRKNRGEQSHDLLTQMLNGKDPETGEPLDDGNIRQQIITFLIAGHQTTSGLLSFALYFLVKNPRVLQKVAEEAARVLVDPVPSYKQVKQLKYVGMVLNEALRLWPVAPMFSLYAKEDTVLGGEYPLTKGDEVMVLVPQLHRDKTIWGDDVEEFRPERFENPSAIPQHAFKPFGNGQRACIGQQFALHSATLVLGMMLKHFDFEDHTNYELVIKESRTLKPEGFVVKAKSKGIPLGGIPSPSTEQSAKKVRKKAENAHNTPLLVLYGSNAGTAEGTARDLADIAMSKGFAPQVATLDSHAGNLPREGAVLIVTASYNGHPPDNAKQFVDWLDQASADEVKGVRYSVFGCGDKNWAGTYQKVPAFIDETLAAKGAENIAKRGEADASDDFEGAYEEWRDHMWSDVAAYFGLDIENSEDNKSTLSLQFVDSAADMPLAKMHGAFSTNVVASKELQQPGSARSTRHLEIELPKEASYQEGDHLGVIPRYYEGIVNRVTQRFGLSASQLIRLEAEEEKLAHLPLAKTVSVEELLQYVELQDPVTRTQLRAMAAKTVCPPHKVELEALLGKQAYKEQVLAKRLTMLELLEKYPACEMSFSEFIALLPSIRPRYYSISSSPRVDLKQASITVSVVSGPAWSGYGEYKGIASNYLAELQEGDTITCFISTPQSEFTLPKDPETPLIMVGPGTGVAPFRGFVQARKQLKEQGQSLGEAHLYFGCRSPHEDYLYQEELENAQSEGIILLHTAFSRMPNQPKTYVQHVMEQDGKKLIELLDQGAHFYICGDGIQMAPAVEATLMKSYADVHQVSEADARLWLQQLEEKGRYAKDVWLG

SEQ ID NO: 1161 - DNA, 3147 bp, synthetic construct
  misc_feature 1..3147: note = variant of P450 oxidase from Bacillus megaterium
  source 1..3147: mol_type = other DNA
atgacaattaaggaaatgcctcagcctaagacgtttggagaacttaaaaatttaccgttattaaatacagataaaccggttcaagctttgatgcgtattgcggatgaattaggagaaatctttaaattcgaggcgcctggtagcgtaacgcgctatttatcaagtcagcgtctaattaaagaagcatgcgatgaatcacgctttgataaaaacttaagtcaagggcttaaatttgcacgtgattttgttggagacgggctggttacaagctggacgcatgaaccgaattggaaaaaagcgcataatatcttagttccaagctttagtcagcgcgcaatggggcgttatcatgcgatgatggtcgatatcgccgtgcagcttgttcaaaagtgggagcgtctaaatgcagatgagcatattgaagtatcggaagacatgacacgtttaacgcttgatacaattggtctttgcctgtttaactatcgctttaacagcttttaccgagatacgcctcatccatttattgtgagtgtggttcgtgcactggatgaagtaatgaacaagctgcagcgagcaaatccagacgacccagcttatgatgaaaacaagcgccagtgtcaagaagatatcaaggtgatgaacgactatgtagataaaattattgcagatcgcaaagcaaggggtgaacaaagtcatgatttattaacgcagatgctaaacggaaaagatccagaaacgggtgagccgcttgatgacgggaacattcgtcagcaaattattacattcttaattgcgggacaccaaacgacaagtggtcttttatcatttgcgctgtatttcttagtgaaaaatccacgtgtattacaaaaagtagcagaagaagcagcacgagttctagtagatcctgttccaagctacaaacaagtcaaacagcttaaatatgttggcatggtcttaaacgaagcgctgcgcttatggccagtagcgcctatgttttccctatatgcaaaagaagatacggtgcttggaggagaatatgaattaacgaaaggcgacgaagtaatggttctggtgcctcagcttcaccgtgataaaacaatttggggagacgatgtggaggagttccgtccagagcgttttgaaaatccaagtgcgattccgcagcatgcgtttaaaccgtttggaaacggtcagcgtgcgtgtatcggtcagcagttcgctcttcatagtgcaacgctggtacttggtatgatgctaaaacactttgactttgaagatcatacaaactacgagctcgttattaaagaatcgcggacgttaaaacctgaaggctttgtggtaaaagcaaaatcgaaaggcattccgcttggcggtattccttcacctagcactgaacagtctgctaaaaaagtacgcaaaaaggcagaaaacgctcataatacgccgctgcttgtgctatacggttcaaatgcgggaacagctgaaggaacggcgcgtgatttagcagatattgcaatgagcaaaggatttgcaccgcaggtcgcaacgcttgattcacacgccggtaatcttccgcgcgaaggagctgtattaattgtaacggcgtcttataacggtcatccgcctgataacgcaaagcaatttgtcgattggttagaccaagcgtctgcggatgaagtaaaaggcgttcgctactccgtatttggatgcggcgataaaaattgggcggggacgtatcaaaaagtgcctgcttttatcgatgaaacgcttgccgctaaaggggcagaaaacatcgctaagcgcggtgaagcagatgcaagcgacgactttgaaggcgcgtatgaagaatggcgtgatcatatgtggagtgacgtagcagcctactttggtctcgacattgaaaacagtgaagataataaatctactctttcacttcaatttgtcgacagcgcggcggatatgcctcttgcgaaaatgcacggtgcgttttcaacgaacgtcgtagcaagcaaagaacttcaacagcctggcagtgcacgaagcacgcgacatcttgaaattgaacttccaaaagaagcttcttatcaagaaggagatcatttaggtgttattcctcgctattatgaaggaatagtaaaccgtgtaacacagaggttcggcctaagcgcatcacagctgatccgtctggaagcagaagaagaaaaattagctcatttgccactcgctaaaacagtatccgtagaagagcttctgcaatacgtggagcttcaagatcctgttacgcgcacgcagcttcgcgcaatggctgctaaaacggtctgcccgccgcataaagtagagcttgaagccttgcttggcaagcaagcctacaaagaacaagtgctggcaaaacgtttaacaatgcttgaactgcttgaaaaatacccggcgtgtgaaatgagtttcagcgaatttatcgcccttctgccaagcatacgcccgcgctattactcgatttcttcatcacctcgtgtcgatctgaaacaagcaagcatcacggtcagcgttgtcagtggactggcgtggagcggatatggagaatataaaggaattgcgtcgaactatcttgctgagctgcaagaaggagatacgattacgtgctttatttccacaccgcagtcagagtttacgctgccaaaagaccctgaaacgccgcttatcatggtcggaccgggaacaggcgtcgcgccgtttagaggctttgtgcaggcgcgcaaacagctaaaagaacaaggacagtcacttggagaagcacatttatacttcggctgccgttcacctcatgaagactatctgtatcaagaagagcttgaaaacgcccaaagcgaaggcatcattctgcttcataccgctttttctcgcatgccgaatcagccgaaaacatacgttcagcacgtaatggaacaagacggcaagaaattgattgaacttcttgatcaaggagcgcacttctatatttgcggagacggaattcaaatggcacctgccgttgaagcaacgcttatgaaaagctatgctgacgttcaccaagtgagtgaagcagacgctcgcttatggctgcagcagctagaagaaaaaggccgatacgcaaaagacgtgtggctgggg

SEQ ID NO: 1162 - protein, 1049 aa, synthetic construct
  REGION 1..1049: note = variant of P450 oxidase from Bacillus megaterium
MTIKEMPQPKTFGELKNLPLLNTDKPVQALMRIADELGEIFKFEAPGSVTRYLSSQRLIKEACDESRFDKNLSQGLKFARDFVGDGLVTSWTHEPNWKKAHNILVPSFSQRAMGRYHAMMVDIAVQLVQKWERLNADEHIEVSEDMTRLTLDTIGLCLFNYRFNSFYRDTPHPFIVSVVRALDEVMNKLQRANPDDPAYDENKRQCQEDIKVMNDYVDKIIADRKARGEQSHDLLTQMLNGKDPETGEPLDDGNIRQQIITFLIAGHQTTSGLLSFALYFLVKNPRVLQKVAEEAARVLVDPVPSYKQVKQLKYVGMVLNEALRLWPVAPMFSLYAKEDTVLGGEYELTKGDEVMVLVPQLHRDKTIWGDDVEEFRPERFENPSAIPQHAFKPFGNGQRACIGQQFALHSATLVLGMMLKHFDFEDHTNYELVIKESRTLKPEGFVVKAKSKGIPLGGIPSPSTEQSAKKVRKKAENAHNTPLLVLYGSNAGTAEGTARDLADIAMSKGFAPQVATLDSHAGNLPREGAVLIVTASYNGHPPDNAKQFVDWLDQASADEVKGVRYSVFGCGDKNWAGTYQKVPAFIDETLAAKGAENIAKRGEADASDDFEGAYEEWRDHMWSDVAAYFGLDIENSEDNKSTLSLQFVDSAADMPLAKMHGAFSTNVVASKELQQPGSARSTRHLEIELPKEASYQEGDHLGVIPRYYEGIVNRVTQRFGLSASQLIRLEAEEEKLAHLPLAKTVSVEELLQYVELQDPVTRTQLRAMAAKTVCPPHKVELEALLGKQAYKEQVLAKRLTMLELLEKYPACEMSFSEFIALLPSIRPRYYSISSSPRVDLKQASITVSVVSGLAWSGYGEYKGIASNYLAELQEGDTITCFISTPQSEFTLPKDPETPLIMVGPGTGVAPFRGFVQARKQLKEQGQSLGEAHLYFGCRSPHEDYLYQEELENAQSEGIILLHTAFSRMPNQPKTYVQHVMEQDGKKLIELLDQGAHFYICGDGIQMAPAVEATLMKSYADVHQVSEADARLWLQQLEEKGRYAKDVWLG

SEQ ID NO: 1163 - DNA, 3147 bp, synthetic construct
  misc_feature 1..3147: note = variant of P450 oxidase from Bacillus megaterium
  source 1..3147: mol_type = other DNA
atgacaattaaggaaatgcctcagcctaagacgtttggagaacttaaaaatttaccgttattaaatacagataaaccggttcaagctttgatgcgtattgcggatgaattaggagaaatctttaaattcgaggcacctggtagcgtaacgcgctatttatcaagtcagcgtctaattaaagaagcatgcgatgaatcacgctttgataaaaacttaagtcaagggcttaaatttgcacgtgattttgttggagacgggctggttacaagctggacgcatgaaccgaattggaaaaaagcgcataatatcttagttccaagctttagtcagcatgcaatggggcgttatcatgcgatgatggtcgatatcgccgtgcagctggttcaaaagtgggagcgtctaaatgcagatgagcatattgaagtatcggaagacatgacacgtttaacgcttgatacaattggtctttgcctgtttaactatcgctttaacagcttttaccgagatacgcctcatccatttattgtgagtgtggttcgtgcactggatgaagtaatgaacaagctgcagcgagcaaatactgacgacccagcttatgatgaaaacaagcgccagtgtcaagaagatatcaaggtgatgaacgactatgtagataaaattattgcagatcgcaaagcaaggggtgaacaaagtcatgatttattaacgcagatgctaaacggaaaagatccagaaacgggtgagccgcttgatgacgggaacattcgtcagcaaattattacattcttaattgcgggacaccaaacgacaagtggtcttttatcatttgcgctgtatttcttagtgaaaaatccacgtgtattacaaaaagtagcagaagaagcagcacgagttctagtagatcctgttccaagctacaaacaagtcaaacagcttaaatatgttggcatggtcttaaacgaagcgctgcgcttatggccagtagcgcctatgttttccctatatgcaaaagaagatacggtgcttggaggagaatatccgttaacgaaaggcgacgaagtaatggttctggtgcctcagcttcaccgtgataaaacaatttggggagacgatgtggaggagttccgtccagagcgttttgaaaatccaagtgcgattccgcagcatgcgtttaaaccgtttggaaacggtcagcgtgcgtgtatcggtcagcagttcgctcttcatagtgcaacgctggtacttggtatgatgctaaaacactttgactttgaagatcatacaaactacgagctcgttattaaagaatcgcggacgttaaaacctgaaggctttgtggtaaaagcaaaatcgaaaggcattccgcttggcggtattccttcacctagcactgaacagtctgctaaaaaagtacgcaaaaaggcagaaaacgctcataatacgccgctgcttgtgctatacggttcaaatgcgggaacagctgaaggaacggcgcgtgatttagcagatattgcaatgagcaaaggatttgcaccgcaggtcgcaacgcttgattcacacgccggtaatcttccgcgcgaaggagctgtattaattgtaacggcgtcttataacggtcatccgcctgataacgcaaagcaatttgtcgattggttagaccaagcgtctgcggatgaagtaaaaggcgttcgctactccgtatttggatgcggcgataaaaattgggcggggacgtatcaaaaagtgcctgcttttatcgatgaaacgcttgccgctaaaggggcagaaaacatcgctaagcgcggtgaagcagatgcaagcgacgactttgaaggcgcgtatgaagaatggcgtgatcatatgtggagtgacgtagcagcctactttggtctcgacattgaaaacagtgaagataataaatctactctttcacttcaatttgtcgacagcgcggcggatatgcctcttgcgaaaatgcacggtgcgttttcaacgaacgtcgtagcaagcaaagaacttcaacagcctggcagtgcacgaagcacgcgacatcttgaaattgaacttccaaaagaagcttcttatcaagaaggagatcatttaggtgttattcctcgctattatgaaggaatagtaaaccgtgtaacacagaggttcggcctaagcgcatcacagctgatccgtctggaagcagaagaagaaaaattagctcatttgccactcgctaaaacagtatccgtagaagagcttctgcaatacgtggagcttcaagatcctgttacgcgcacgcagcttcgcgcaatggctgctaaaacggtctgcccgccgcataaagtagagcttgaagccttgcttggcaagcaagcctacaaagaacaagtgctggcaaaacgtttaacaatgcttgaactgcttgaaaaatacccggcgtgtgaaatgagtttcagcgaatttatcgcccttctgccaagcatacgcccgcgctattactcgatttcttcatcacctcgtgtcgatctgaaacaagcaagcatcacggtcagcgttgtcagtggactggcgtggagcggatatggagaatataaaggaattgcgtcgaactatcttgctgagctgcaagaaggagatacgattacgtgctttatttccacaccgcagtcagagtttacgctgccaaaagaccctgaaacgccgcttatcatggtcggaccgggaacaggcgtcgcgccgtttagaggctttgtgcaggcgcgcaaacagctaaaagaacaaggacagtcacttggagaagcacatttatacttcggctgccgttcacctcatgaagactatctgtatcaagaagagcttgaaaacgcccaaagcgaaggcatcattctgcttcataccgctttttctcgcatgccgaatcagccgaaaacatacgttcagcacgtaatggaacaagacggcaagaaattgattgaacttcttgatcaaggagcgcacttctatatttgcggagacggaattcaaatggcacctgccgttgaagcaacgcttatgaaaagctatgctgacgttcaccaagtgagtgaagcagacgctcgcttatggctgcagcagctagaagaaaaaggccgatacgcaaaagacgtgtggctgggg

SEQ ID NO: 1164 - protein, 1049 aa, synthetic construct
  REGION 1..1049: note = variant of P450 oxidase from Bacillus megaterium
MTIKEMPQPKTFGELKNLPLLNTDKPVQALMRIADELGEIFKFEAPGSVTRYLSSQRLIKEACDESRFDKNLSQGLKFARDFVGDGLVTSWTHEPNWKKAHNILVPSFSQHAMGRYHAMMVDIAVQLVQKWERLNADEHIEVSEDMTRLTLDTIGLCLFNYRFNSFYRDTPHPFIVSVVRALDEVMNKLQRANTDDPAYDENKRQCQEDIKVMNDYVDKIIADRKARGEQSHDLLTQMLNGKDPETGEPLDDGNIRQQIITFLIAGHQTTSGLLSFALYFLVKNPRVLQKVAEEAARVLVDPVPSYKQVKQLKYVGMVLNEALRLWPVAPMFSLYAKEDTVLGGEYPLTKGDEVMVLVPQLHRDKTIWGDDVEEFRPERFENPSAIPQHAFKPFGNGQRACIGQQFALHSATLVLGMMLKHFDFEDHTNYELVIKESRTLKPEGFVVKAKSKGIPLGGIPSPSTEQSAKKVRKKAENAHNTPLLVLYGSNAGTAEGTARDLADIAMSKGFAPQVATLDSHAGNLPREGAVLIVTASYNGHPPDNAKQFVDWLDQASADEVKGVRYSVFGCGDKNWAGTYQKVPAFIDETLAAKGAENIAKRGEADASDDFEGAYEEWRDHMWSDVAAYFGLDIENSEDNKSTLSLQFVDSAADMPLAKMHGAFSTNVVASKELQQPGSARSTRHLEIELPKEASYQEGDHLGVIPRYYEGIVNRVTQRFGLSASQLIRLEAEEEKLAHLPLAKTVSVEELLQYVELQDPVTRTQLRAMAAKTVCPPHKVELEALLGKQAYKEQVLAKRLTMLELLEKYPACEMSFSEFIALLPSIRPRYYSISSSPRVDLKQASITVSVVSGLAWSGYGEYKGIASNYLAELQEGDTITCFISTPQSEFTLPKDPETPLIMVGPGTGVAPFRGFVQARKQLKEQGQSLGEAHLYFGCRSPHEDYLYQEELENAQSEGIILLHTAFSRMPNQPKTYVQHVMEQDGKKLIELLDQGAHFYICGDGIQMAPAVEATLMKSYADVHQVSEADARLWLQQLEEKGRYAKDVWLG

SEQ ID NO: 1165 - DNA, 3147 bp, synthetic construct
  misc_feature 1..3147: note = variant of P450 oxidase from Bacillus megaterium
  source 1..3147: mol_type = other DNA
atgacaattaaggaaatgcctcagcctaagacgtttggagaacttaaaaatttaccgttattaaatacagataaaccggttcaagctttgatgcgtattgcggatgaattaggagaaatctttaaattcgaggcgcctggtagcgtaacgcgctatttatcaagtcagcgtctaattaaagaagcatgcgatgaatcacgctttgataaaaacttaagtcaagggcttaaatttgcacgtgattttgttggagacgggctggttacaagctggacgcatgaaccgaattggaaaaaagcgcataatatcttagttccaagctttagtcagctggcaatggggcgttatcatgcgatgatggtcgatatcgccgtgcagcttgttcaaaagtgggagcgtctaaatgcagatgagcatattgaagtatcggaagacatgacacgtttaacgcttgatacaattggtctttgcctgtttaactatcgctttaacagcttttaccgagatacgcctcatccatttattgtgagtgtggttcgtgcactggatgaagtaatgaacaagctgcagcgagcaaatccagacgacccagcttatgatgaaaacaagcgccagtgtcaagaagataccaaggtgatgaacgactatgtagataaaattattgcagatcgcaaagcaaggggtgaacaaagtcatgatttattaacgcagatgctaaacggaaaagatccagaaacgggtgagccgcttgatgacgggaacattcgtcagcaaattattacattcttaattgcgggacaccaaacgacaagtggtcttttatcatttgcgctgtatttcttagtgaaaaatccacgtgtattacaaaaagtagcagaagaagcagcacgagttctagtagatcctgttccaagctacaaacaagtcaaacagcttaaatatgttggcatggtcttaaacgaagcgctgcgcttatggccagtagcgcctatgttttccctatatgcaaaagaagatacggtgcttggaggagaatatcctttaacgaaaggcgacgaagtaatggttctggtgcctcagcttcaccgtgataaaacaatttggggagacgatgtggaggagttccgtccagagcgttttgaaaatccaagtgcgattccgcagcatgcgtttaaaccgtttggaaacggtcagcgtgcgtgtatcggtcagcagttcgctcttcatagtgcaacgctggtacttggtatgatgctaaaacactttgactttgaagatcatacaaactacgagctcgttattaaagaatcgcggacgttaaaacctgaaggctttgtggtaaaagcaaaatcgaaaggcattccgcttggcggtattccttcacctagcactgaacagtctgctaaaaaagtacgcaaaaaggcagaaaacgctcataatacgccgctgcttgtgctatacggttcaaatgcgggaacagctgaaggaacggcgcgtgatttagcagatattgcaatgagcaaaggatttgcaccgcaggtcgcaacgcttgattcacacgccggtaatcttccgcgcgaaggagctgtattaattgtaacggcgtcttataacggtcatccgcctgataacgcaaagcaatttgtcgattggttagaccaagcgtctgcggatgaagtaaaaggcgttcgctactccgtatttggatgcggcgataaaaattgggcggggacgtatcaaaaagtgcctgcttttatcgatgaaacgcttgccgctaaaggggcagaaaacatcgctaagcgcggtgaagcagatgcaagcgacgactttgaaggcgcgtatgaagaatggcgtgatcatatgtggagtgacgtagcagcctactttggtctcgacattgaaaacagtgaagataataaatctactctttcacttcaatttgtcgacagcgcggcggatatgcctcttgcgaaaatgcacggtgcgttttcaacgaacgtcgtagcaagcaaagaacttcaacagcctggcagtgcacgaagcacgcgacatcttgaaattgaacttccaaaagaagcttcttatcaagaaggagatcatttaggtgttattcctcgctattatgaaggaatagtaaaccgtgtaacacagaggttcggcctaagcgcatcacagctgatccgtctggaagcagaagaagaaaaattagctcatttgccactcgctaaaacagtatccgtagaagagcttctgcaatacgtggagcttcaagatcctgttacgcgcacgcagcttcgcgcaatggctgctaaaacggtctgcccgccgcataaagtagagcttgaagccttgcttggcaagcaagcctacaaagaacaagtgctggcaaaacgtttaacaatgcttgaactgcttgaaaaatacccggcgtgtgaaatgagtttcagcgaatttatcgcccttctgccaagcatacgcccgcgctattactcgatttcttcatcacctcgtgtcgatctgaaacaagcaagcatcacggtcagcgttgtcagcggaccggcgtggagcggatatggagaatataaaggaattgcgtcgaactatcttgctgagctgcaagaaggagatacgattacgtgctttatttccacaccgcagtcagagtttacgctgccaaaagaccctgaaacgccgcttatcatggtcggaccgggaacaggcgtcgcgccgtttagaggctttgtgcaggcgcgcaaacagctaaaagaacaaggacagtcacttggagaagcacatttatacttcggctgccgttcacctcatgaagactatctgtatcaagaagagcttgaaaacgcccaaagcgaaggcatcattctgcttcataccgctttttctcgcatgccgaatcagccgaaaacatacgttcagcacgtaatggaacaagacggcaagaaattgattgaacttcttgatcaaggagcgcacttctatatttgcggagacggaattcaaatggcacctgccgttgaagcaacgcttatgaaaagctatgctgacgttcaccaagtgagtgaagcagacgctcgcttatggctgcagcagctagaagaaaaaggccgatacgcaaaagacgtgtggctgggg

SEQ ID NO: 1166 - protein, 1049 aa, synthetic construct
  REGION 1..1049: note = variant of P450 oxidase from Bacillus megaterium
MTIKEMPQPKTFGELKNLPLLNTDKPVQALMRIADELGEIFKFEAPGSVTRYLSSQRLIKEACDESRFDKNLSQGLKFARDFVGDGLVTSWTHEPNWKKAHNILVPSFSQLAMGRYHAMMVDIAVQLVQKWERLNADEHIEVSEDMTRLTLDTIGLCLFNYRFNSFYRDTPHPFIVSVVRALDEVMNKLQRANPDDPAYDENKRQCQEDTKVMNDYVDKIIADRKARGEQSHDLLTQMLNGKDPETGEPLDDGNIRQQIITFLIAGHQTTSGLLSFALYFLVKNPRVLQKVAEEAARVLVDPVPSYKQVKQLKYVGMVLNEALRLWPVAPMFSLYAKEDTVLGGEYPLTKGDEVMVLVPQLHRDKTIWGDDVEEFRPERFENPSAIPQHAFKPFGNGQRACIGQQFALHSATLVLGMMLKHFDFEDHTNYELVIKESRTLKPEGFVVKAKSKGIPLGGIPSPSTEQSAKKVRKKAENAHNTPLLVLYGSNAGTAEGTARDLADIAMSKGFAPQVATLDSHAGNLPREGAVLIVTASYNGHPPDNAKQFVDWLDQASADEVKGVRYSVFGCGDKNWAGTYQKVPAFIDETLAAKGAENIAKRGEADASDDFEGAYEEWRDHMWSDVAAYFGLDIENSEDNKSTLSLQFVDSAADMPLAKMHGAFSTNVVASKELQQPGSARSTRHLEIELPKEASYQEGDHLGVIPRYYEGIVNRVTQRFGLSASQLIRLEAEEEKLAHLPLAKTVSVEELLQYVELQDPVTRTQLRAMAAKTVCPPHKVELEALLGKQAYKEQVLAKRLTMLELLEKYPACEMSFSEFIALLPSIRPRYYSISSSPRVDLKQASITVSVVSGPAWSGYGEYKGIASNYLAELQEGDTITCFISTPQSEFTLPKDPETPLIMVGPGTGVAPFRGFVQARKQLKEQGQSLGEAHLYFGCRSPHEDYLYQEELENAQSEGIILLHTAFSRMPNQPKTYVQHVMEQDGKKLIELLDQGAHFYICGDGIQMAPAVEATLMKSYADVHQVSEADARLWLQQLEEKGRYAKDVWLG

SEQ ID NO: 1167 - DNA, 3147 bp, synthetic construct
  misc_feature 1..3147: note = variant of P450 oxidase from Bacillus megaterium
  source 1..3147: mol_type = other DNA
atgacaattaaggaaatgcctcagcctaagacgtttggagaacttaaaaatttaccgttattaaatacagataaaccggttcaagctttgatgcgtattgcggatgaattaggagaaatctttaaattcgaggcgcctggtagcgtaacgcgctatttatcaagtcagcgtctaattaaagaagcatgcgatgaatcacgctttgataaaaacttaagtcaagggcttaaatttgcacgtgattttgttggagacgggctggttacaagctggacgcatgaaccgaattggaaaaaagcgcataatatcttagttccaagctttagtcagcgcgcaatggggcgttatcatgcgatgatggtcgatatcgccgtgcagcttgttcaaaagtgggagcgtctaaatgcagatgagcatattgaagtatcggaagacatgacacgtttaacgcttgatacaattggtctttgcctgtttaactatcgctttaacagcttttaccgagatacgcctcatccatttattgtgagtgtggttcgtgcactggatgaagtaatgaacaagctgcagcgagcaaatactgacgacccagcttatgatgaaaacaagcgccagtgtcaagaagatatcaaggtgatgaacgactatgtagataaaattattgcagatcgcaaagcaaggggtgaacaaagtcatgatttattaacgcagatgctaaacggaaaagatccagaaacgggtgagccgcttgatgacgggaacattcgtcagcaaattattacattcttaattgcgggacaccaaacgacaagtggtcttttatcatttgcgctgtatttcttagtgaaaaatccacgtgtattacaaaaagtagcagaagaagcagcacgagttctagtagatcctgttccaagctacaaacaagtcaaacagcttaaatatgttggcatggtcttaaacgaagcgctgcgcttatggccagtagcgcctatgttttccctatatgcaaaagaagatacggtgcttggaggagaatattcgttaacgaaaggcgacgaagtaatggttctggtgcctcagcttcaccgtgataaaacaatttggggagacgatgtggaggagttccgtccagagcgttttgaaaatccaagtgcgattccgcagcatgcgtttaaaccgtttggaaacggtcagcgtgcgtgtatcggtcagcagttcgctcttcatagtgcaacgctggtacttggtatgatgctaaaacactttgactttgaagatcatacaaactacgagctcgttattaaagaatcgcggacgttaaaacctgaaggctttgtggtaaaagcaaaatcgaaaggcattccgcttggcggtattccttcacctagcactgaacagtctgctaaaaaagtacgcaaaaaggcagaaaacgctcataatacgccgctgcttgtgctatacggttcaaatgcgggaacagctgaaggaacggcgcgtgatttagcagatattgcaatgagcaaaggatttgcaccgcaggtcgcaacgcttgattcacacgccggtaatcttccgcgcgaaggagctgtattaattgtaacggcgtcttataacggtcatccgcctgataacgcaaagcaatttgtcgattggttagaccaagcgtctgcggatgaagtaaaaggcgttcgctactccgtatttggatgcggcgataaaaattgggcggggacgtatcaaaaagtgcctgcttttatcgatgaaacgcttgccgctaaaggggcagaaaacatcgctaagcgcggtgaagcagatgcaagcgacgactttgaaggcgcgtatgaagaatggcgtgatcatatgtggagtgacgtagcagcctactttggtctcgacattgaaaacagtgaagataataaatctactctttcacttcaatttgtcgacagcgcggcggatatgcctcttgcgaaaatgcacggtgcgttttcaacgaacgtcgtagcaagcaaagaacttcaacagcctggcagtgcacgaagcacgcgacatcttgaaattgaacttccaaaagaagcttcttatcaagaaggagatcatttaggtgttattcctcgctattatgaaggaatagtaaaccgtgtaacacagaggttcggcctaagcgcatcacagctgatccgtctggaagcagaagaagaaaaattagctcatttgccactcgctaaaacagtatccgtagaagagcttctgcaatacgtggagcttcaagatcctgttacgcgcacgcagcttcgcgcaatggctgctaaaacggtctgcccgccgcataaagtagagcttgaagccttgcttggcaagcaagcctacaaagaacaagtgctggcaaaacgtttaacaatgcttgaactgcttgaaaaatacccggcgtgtgaaatgagtttcagcgaatttatcgcccttctgccaagcatacgcccgcgctattactcgatttcttcatcacctcgtgtcgatctgaaacaagcaagcatcacggtcagcgttgtcagcggaccggcgtggagcggatatggagaatataaaggaattgcgtcgaactatcttgctgagctgcaagaaggagatacgattacgtgctttatttccacaccgcagtcagagtttacgctgccaaaagaccctgaaacgccgcttatcatggtcggaccgggaacaggcgtcgcgccgtttagaggctttgtgcaggcgcgcaaacagctaaaagaacaaggacagtcacttggagaagcacatttatacttcggctgccgttcacctcatgaagactatctgtatcaagaagagcttgaaaacgcccaaagcgaaggcatcattctgcttcataccgctttttctcgcatgccgaatcagccgaaaacatacgttcagcacgtaatggaacaagacggcaagaaattgattgaacttcttgatcaaggagcgcacttctatatttgcggagacggaattcaaatggcacctgccgttgaagcaacgcttatgaaaagctatgctgacgttcaccaagtgagtgaagcagacgctcgcttatggctgcagcagctagaagaaaaaggccgatacgcaaaagacgtgtggctgggg

SEQ ID NO: 1168 - protein, 1049 aa, synthetic construct
  REGION 1..1049: note = variant of P450 oxidase from Bacillus megaterium
MTIKEMPQPKTFGELKNLPLLNTDKPVQALMRIADELGEIFKFEAPGSVTRYLSSQRLIKEACDESRFDKNLSQGLKFARDFVGDGLVTSWTHEPNWKKAHNILVPSFSQRAMGRYHAMMVDIAVQLVQKWERLNADEHIEVSEDMTRLTLDTIGLCLFNYRFNSFYRDTPHPFIVSVVRALDEVMNKLQRANTDDPAYDENKRQCQEDIKVMNDYVDKIIADRKARGEQSHDLLTQMLNGKDPETGEPLDDGNIRQQIITFLIAGHQTTSGLLSFALYFLVKNPRVLQKVAEEAARVLVDPVPSYKQVKQLKYVGMVLNEALRLWPVAPMFSLYAKEDTVLGGEYSLTKGDEVMVLVPQLHRDKTIWGDDVEEFRPERFENPSAIPQHAFKPFGNGQRACIGQQFALHSATLVLGMMLKHFDFEDHTNYELVIKESRTLKPEGFVVKAKSKGIPLGGIPSPSTEQSAKKVRKKAENAHNTPLLVLYGSNAGTAEGTARDLADIAMSKGFAPQVATLDSHAGNLPREGAVLIVTASYNGHPPDNAKQFVDWLDQASADEVKGVRYSVFGCGDKNWAGTYQKVPAFIDETLAAKGAENIAKRGEADASDDFEGAYEEWRDHMWSDVAAYFGLDIENSEDNKSTLSLQFVDSAADMPLAKMHGAFSTNVVASKELQQPGSARSTRHLEIELPKEASYQEGDHLGVIPRYYEGIVNRVTQRFGLSASQLIRLEAEEEKLAHLPLAKTVSVEELLQYVELQDPVTRTQLRAMAAKTVCPPHKVELEALLGKQAYKEQVLAKRLTMLELLEKYPACEMSFSEFIALLPSIRPRYYSISSSPRVDLKQASITVSVVSGPAWSGYGEYKGIASNYLAELQEGDTITCFISTPQSEFTLPKDPETPLIMVGPGTGVAPFRGFVQARKQLKEQGQSLGEAHLYFGCRSPHEDYLYQEELENAQSEGIILLHTAFSRMPNQPKTYVQHVMEQDGKKLIELLDQGAHFYICGDGIQMAPAVEATLMKSYADVHQVSEADARLWLQQLEEKGRYAKDVWLG

SEQ ID NO: 1169 - DNA, 3147 bp, synthetic construct
  misc_feature 1..3147: note = variant of P450 oxidase from Bacillus megaterium
  source 1..3147: mol_type = other DNA
atgacaattaaggaaatgcctcagcctaagacgtttggagaacttaaaaatttaccgttattaaatacagataaaccggttcaagctttgatgcgtattgcggatgaattaggagaaatctttaaattcgaggcacctggtagcgtaacgcgctatttatcaagtcagcgtctaattaaagaagcatgcgatgaatcacgctttgataaaaacttaagtcaagggcttaaatttgcacgtgattttgttggagacgggctggttacaagctggacgcatgaaccgaattggaaaaaagcgcataatatcttagttccaagctttagtcagcgcgcaatggggcgttatcatgcgatgatggtcgatatcgccgtgcagatggttcaaaagtgggagcgtctaaatgcagatgagcatattgaagtatcggaagacatgacacgtttaacgcttgatacaattggtctttgcctgtttaactatcgctttaacagcttttaccgagatacgcctcatccatttattgtgagtgtggttcgtgcactggatgaagtaatgaacaagctgcagcgagcaaatccagacgacccagcttatgatgaaaacaagcgccagtgtcaagaagatatcaaggtgatgaacgactatgtagataaaattattgcagatcgcaaaaacaggggtgaacaaagtcatgatttattaacgcagatgctaaacggaaaagattatgaaacgggtgagccgcttgatgacgggaatattcgtcagcaaattattacattcttaattgcgggacaccaaacgacaagtggtcttttatcatttgcgctgtatttcttagtgaaaaatccacgtgtattacaaaaagtagcagaagaagcagcacgagttctagtagatcctgttccaagctacaaacaagtcaaacagcttaaatatgttggcatggtcttaaacgaagcgctgcgcttatggccagtagcgcctatgttttccctatatgcaaaagaagatacggtgcttggaggagaatatccgttaacgaaaggcgacgaagtaatggttctggtgcctcagcttcaccgtgataaaacaatttggggagacgatgtggaggagttccgtccagagcgttttgaaaatccaagtgcgattccgcagcatgcgtttaaaccgtttggaaacggtcagcgtgcgtgtatcggtcagcagttcgctcttcatagtgcaacgctggtacttggtatgatgctaaaacactttgactttgaagatcatacaaactacgagctcgttattaaagaatcgcggacgttaaaacctgaaggctttgtggtaaaagcaaaatcgaaaggcattccgcttggcggtattccttcacctagcactgaacagtctgctaaaaaagtacgcaaaaaggcagaaaacgctcataatacgccgctgcttgtgctatacggttcaaatgcgggaacagctgaaggaacggcgcgtgatttagcagatattgcaatgagcaaaggatttgcaccgcaggtcgcaacgcttgattcacacgccggtaatcttccgcgcgaaggagctgtattaattgtaacggcgtcttataacggtcatccgcctgataacgcaaagcaatttgtcgattggttagaccaagcgtctgcggatgaagtaaaaggcgttcgctactccgtatttggatgcggcgataaaaattgggcggggacgtatcaaaaagtgcctgcttttatcgatgaaacgcttgccgctaaaggggcagaaaacatcgctaagcgcggtgaagcagatgcaagcgacgactttgaaggcgcgtatgaagaatggcgtgatcatatgtggagtgacgtagcagcctactttggtctcgacattgaaaacagtgaagataataaatctactctttcacttcaatttgtcgacagcgcggcggatatgcctcttgcgaaaatgcacggtgcgttttcaacgaacgtcgtagcaagcaaagaacttcaacagcctggcagtgcacgaagcacgcgacatcttgaaattgaacttccaaaagaagcttcttatcaagaaggagatcatttaggtgttattcctcgctattatgaaggaatagtaaaccgtgtaacacagaggttcggcctaagcgcatcacagctgatccgtctggaagcagaagaagaaaaattagctcatttgccactcgctaaaacagtatccgtagaagagcttctgcaatacgtggagcttcaagatcctgttacgcgcacgcagcttcgcgcaatggctgctaaaacggtctgcccgccgcataaagtagagcttgaagccttgcttggcaagcaagcctacaaagaacaagtgctggcaaaacgtttaacaatgcttgaactgcttgaaaaatacccggcgtgtgaaatgagtttcagcgaatttatcgcccttctgccaagcatacgcccgcgctattactcgatttcttcatcacctcgtgtcgatctgaaacaagcaagcatcacggtcagcgttgtcagtggaccggcgtggagcggatatggagaatataaaggaattgcgtcgaactatcttgctgagctgcaagaaggagatacgattacgtgctttatttccacaccgcagtcagagtttacgctgccaaaagaccctgaaacgccgcttatcatggtcggaccgggaacaggcgtcgcgccgtttagaggctttgtgcaggcgcgcaaacagctaaaagaacaaggacagtcacttggagaagcacatttatacttcggctgccgttcacctcatgaagactatctgtatcaagaagagcttgaaaacgcccaaagcgaaggcatcattctgcttcataccgctttttctcgcatgccgaatcagccgaaaacatacgttcagcacgtaatggaacaagacggcaagaaattgattgaacttcttgatcaaggagcgcacttctatatttgcggagacggaattcaaatggcacctgccgttgaagcaacgcttatgaaaagctatgctgacgttcaccaagtgagtgaagcagacgctcgcttatggctgcagcagctagaagaaaaaggccgatacgcaaaagacgtgtggctgggg

SEQ ID NO: 1170 - protein, 1049 aa, synthetic construct
  REGION 1..1049: note = variant of P450 oxidase from Bacillus megaterium
MTIKEMPQPKTFGELKNLPLLNTDKPVQALMRIADELGEIFKFEAPGSVTRYLSSQRLIKEACDESRFDKNLSQGLKFARDFVGDGLVTSWTHEPNWKKAHNILVPSFSQRAMGRYHAMMVDIAVQMVQKWERLNADEHIEVSEDMTRLTLDTIGLCLFNYRFNSFYRDTPHPFIVSVVRALDEVMNKLQRANPDDPAYDENKRQCQEDIKVMNDYVDKIIADRKNRGEQSHDLLTQMLNGKDYETGEPLDDGNIRQQIITFLIAGHQTTSGLLSFALYFLVKNPRVLQKVAEEAARVLVDPVPSYKQVKQLKYVGMVLNEALRLWPVAPMFSLYAKEDTVLGGEYPLTKGDEVMVLVPQLHRDKTIWGDDVEEFRPERFENPSAIPQHAFKPFGNGQRACIGQQFALHSATLVLGMMLKHFDFEDHTNYELVIKESRTLKPEGFVVKAKSKGIPLGGIPSPSTEQSAKKVRKKAENAHNTPLLVLYGSNAGTAEGTARDLADIAMSKGFAPQVATLDSHAGNLPREGAVLIVTASYNGHPPDNAKQFVDWLDQASADEVKGVRYSVFGCGDKNWAGTYQKVPAFIDETLAAKGAENIAKRGEADASDDFEGAYEEWRDHMWSDVAAYFGLDIENSEDNKSTLSLQFVDSAADMPLAKMHGAFSTNVVASKELQQPGSARSTRHLEIELPKEASYQEGDHLGVIPRYYEGIVNRVTQRFGLSASQLIRLEAEEEKLAHLPLAKTVSVEELLQYVELQDPVTRTQLRAMAAKTVCPPHKVELEALLGKQAYKEQVLAKRLTMLELLEKYPACEMSFSEFIALLPSIRPRYYSISSSPRVDLKQASITVSVVSGPAWSGYGEYKGIASNYLAELQEGDTITCFISTPQSEFTLPKDPETPLIMVGPGTGVAPFRGFVQARKQLKEQGQSLGEAHLYFGCRSPHEDYLYQEELENAQSEGIILLHTAFSRMPNQPKTYVQHVMEQDGKKLIELLDQGAHFYICGDGIQMAPAVEATLMKSYADVHQVSEADARLWLQQLEEKGRYAKDVWLG

SEQ ID NO: 1171 - DNA, 3147 bp, synthetic construct
  misc_feature 1..3147: note = variant of P450 oxidase from Bacillus megaterium
  source 1..3147: mol_type = other DNA
atgacaattaaggaaatgcctcagcctaagacgtttggagaacttaaaaatttaccgttattaaatacagataaaccggttcaagctttgatgcgtattgcggatgaattaggagaaatctttaaattcgaggcgcctggtagcgtaacgcgctatttatcaagtcagcgtctaattaaagaagcatgcgatgaatcacgctttgataaaaacttaagtcaagggcttaaatttgcacgtgattttgttggagacgggctggttacaagctggacgcatgaaccgaattggaaaaaagcgcataatatcttagttccaagctttagtcagcatgcaatggggcgttatcatgcgatgatggtcgatatcgccgtgcagcttgttcaaaagtgggagcgtctaaatgcagatgagcatattgaagtatcggaagacatgacacgtttaacgcttgatacaattggtctttgcctgtttaactatcgctttaacagcttttaccgagatacgcctcatccatttattgtgagtgtggttcgtgcactggatgaagtaatgaacaagctgcagcgagcaaatccagacgacccagcttatgatgaaaacaagcgccagtgtcaagaagatatcaaggtgatgaacgactatgtagataaaattattgcagatcgcaaaaacaggggtgaacaaagtcatgatttattaggtcagatgctaaacggaaaagattatgaaacgggtgagccgcttgatgacgggaatattcgtcagcaaattattacattcttaattgcgggacaccaaacgacaagtggtcttttatcatttgcgctgtatttcttagtgaaaaatccacgtgtattacaaaaagtagcagaagaagcagcacgagttctagtagatcctgttccaagctacaaacaagtcaaacagcttaaatatgttggcatggtcttaaacgaagcgctgcgcttatggccagtagcgcctatgttttccctatatgcaaaagaagatacggtgcttggaggagaatattcgttaacgaaaggcgacgaagtaatggttctggtgcctcagcttcaccgtgataaaacaatttggggagacgatgtggaggagttccgtccagagcgttttgaaaatccaagtgcgattccgcagcatgcgtttaaaccgtttggaaacggtcagcgtgcgtgtatcggtcagcagttcgctcttcatagtgcaacgctggtacttggtatgatgctaaaacactttgactttgaagatcatacaaactacgagctcgttattaaagaatcgcggacgttaaaacctgaaggctttgtggtaaaagcaaaatcgaaaggcattccgcttggcggtattccttcacctagcactgaacagtctgctaaaaaagtacgcaaaaaggcagaaaacgctcataatacgccgctgcttgtgctatacggttcaaatgcgggaacagctgaaggaacggcgcgtgatttagcagatattgcaatgagcaaaggatttgcaccgcaggtcgcaacgcttgattcacacgccggtaatcttccgcgcgaaggagctgtattaattgtaacggcgtcttataacggtcatccgcctgataacgcaaagcaatttgtcgattggttagaccaagcgtctgcggatgaagtaaaaggcgttcgctactccgtatttggatgcggcgataaaaattgggcggggacgtatcaaaaagtgcctgcttttatcgatgaaacgcttgccgctaaaggggcagaaaacatcgctaagcgcggtgaagcagatgcaagcgacgactttgaaggcgcgtatgaagaatggcgtgatcatatgtggagtgacgtagcagcctactttggtctcgacattgaaaacagtgaagataataaatctactctttcacttcaatttgtcgacagcgcggcggatatgcctcttgcgaaaatgcacggtgcgttttcaacgaacgtcgtagcaagcaaagaacttcaacagcctggcagtgcacgaagcacgcgacatcttgaaattgaacttccaaaagaagcttcttatcaagaaggagatcatttaggtgttattcctcgctattatgaaggaatagtaaaccgtgtaacacagaggttcggcctaagcgcatcacagctgatccgtctggaagcagaagaagaaaaattagctcatttgccactcgctaaaacagtatccgtagaagagcttctgcaatacgtggagcttcaagatcctgttacgcgcacgcagcttcgcgcaatggctgctaaaacggtctgcccgccgcataaagtagagcttgaagccttgcttggcaagcaagcctacaaagaacaagtgctggcaaaacgtttaacaatgcttgaactgcttgaaaaatacccggcgtgtgaaatgagtttcagcgaatttatcgcccttctgccaagcatacgcccgcgctattactcgatttcttcatcacctcgtgtcgatctgaaacaagcaagcatcacggtcagcgttgtcagtggactggcgtggagcggatatggagaatataaaggaattgcgtcgaactatcttgctgagctgcaagaaggagatacgattacgtgctttatttccacaccgcagtcagagtttacgctgccaaaagaccctgaaacgccgcttatcatggtcggaccgggaacaggcgtcgcgccgtttagaggctttgtgcaggcgcgcaaacagctaaaagaacaaggacagtcacttggagaagcacatttatacttcggctgccgttcacctcatgaagactatctgtatcaagaagagcttgaaaacgcccaaagcgaaggcatcattctgcttcataccgctttttctcgcatgccgaatcagccgaaaacatacgttcagcacgtaatggaacaagacggcaagaaattgattgaacttcttgatcaaggagcgcacttctatatttgcggagacggaattcaaatggcacctgccgttgaagcaacgcttatgaaaagctatgctgacgttcaccaagtgagtgaagcagacgctcgcttatggctgcagcagctagaagaaaaaggccgatacgcaaaagacgtgtggctgggg

SEQ ID NO: 1172 - protein, 1049 aa, synthetic construct
  REGION 1..1049: note = variant of P450 oxidase from Bacillus megaterium
MTIKEMPQPKTFGELKNLPLLNTDKPVQALMRIADELGEIFKFEAPGSVTRYLSSQRLIKEACDESRFDKNLSQGLKFARDFVGDGLVTSWTHEPNWKKAHNILVPSFSQHAMGRYHAMMVDIAVQLVQKWERLNADEHIEVSEDMTRLTLDTIGLCLFNYRFNSFYRDTPHPFIVSVVRALDEVMNKLQRANPDDPAYDENKRQCQEDIKVMNDYVDKIIADRKNRGEQSHDLLGQMLNGKDYETGEPLDDGNIRQQIITFLIAGHQTTSGLLSFALYFLVKNPRVLQKVAEEAARVLVDPVPSYKQVKQLKYVGMVLNEALRLWPVAPMFSLYAKEDTVLGGEYSLTKGDEVMVLVPQLHRDKTIWGDDVEEFRPERFENPSAIPQHAFKPFGNGQRACIGQQFALHSATLVLGMMLKHFDFEDHTNYELVIKESRTLKPEGFVVKAKSKGIPLGGIPSPSTEQSAKKVRKKAENAHNTPLLVLYGSNAGTAEGTARDLADIAMSKGFAPQVATLDSHAGNLPREGAVLIVTASYNGHPPDNAKQFVDWLDQASADEVKGVRYSVFGCGDKNWAGTYQKVPAFIDETLAAKGAENIAKRGEADASDDFEGAYEEWRDHMWSDVAAYFGLDIENSEDNKSTLSLQFVDSAADMPLAKMHGAFSTNVVASKELQQPGSARSTRHLEIELPKEASYQEGDHLGVIPRYYEGIVNRVTQRFGLSASQLIRLEAEEEKLAHLPLAKTVSVEELLQYVELQDPVTRTQLRAMAAKTVCPPHKVELEALLGKQAYKEQVLAKRLTMLELLEKYPACEMSFSEFIALLPSIRPRYYSISSSPRVDLKQASITVSVVSGLAWSGYGEYKGIASNYLAELQEGDTITCFISTPQSEFTLPKDPETPLIMVGPGTGVAPFRGFVQARKQLKEQGQSLGEAHLYFGCRSPHEDYLYQEELENAQSEGIILLHTAFSRMPNQPKTYVQHVMEQDGKKLIELLDQGAHFYICGDGIQMAPAVEATLMKSYADVHQVSEADARLWLQQLEEKGRYAKDVWLG

SEQ ID NO: 1173 - DNA, 3147 bp, synthetic construct
  misc_feature 1..3147: note = variant of P450 oxidase from Bacillus megaterium
  source 1..3147: mol_type = other DNA
atgacaattaaggaaatgcctcagcctaagacgtttggagaacttaaaaatttaccgttattaaatacagataaaccggttcaagctttgatgcgtattgcggatgaattaggagaaatctttaaattcgaggcacctggtagcgtaacgcgctatttatcaagtcagcgtctaattaaagaagcatgcgatgaatcacgctttgataaaaacttaagtcaagggcttaaatttgcacgtgattttgttggagacgggctggttacaagctggacgcatgaaccgaattggaaaaaagcgcataatatcttagttccaagctttagtcagcacgcaatggggcgttatcatgcgatgatggtcgatatcgccgtgcagcttgttcaaaagtgggagcgtctaaatgcagatgagcatattgaagtatcggaagacatgacacgtttaacgcttgatacaattggtctttgcctgtttaactatcgctttaacagcttttaccgagatacgcctcatccatttattgtgagtgtggttcgtgcactggatgaagtaatgaacaagctgcagcgagcaaatccagacgacccagcttatgatgaaaacaagcgccagtgtcaagaagatatcaaggtgatgaacgactatgtagataaaattattgcagatcgcaaagcaaggggtgaacaaagtcatgatttattaacgcagatgctaaacggaaaagattatgaaacgggtgagccgcttgatgacgggaacattcgtcagcaaattattacattcttaattgcgggacaccaaacgacaagtggtcttttatcatttgcgctgtatttcttagtgaaaaatccacgtgtattacaaaaagtagcagaagaagcagcacgagttctagtagatcctgttccaagctacaaacaagtcaaacagcttaaatatgttggcatggtcttaaacgaagcgctgcgcttatggccagtagcgcctatgttttccctatatgcaaaagaagatacggtgcttggaggagaatatccgttaacgaaaggcgacgaagtaatggttctggtgcctcagcttcaccgtgataaaacaatttggggagacgatgtggaggagttccgtccagagcgttttgaaaatccaagtgcgattccgcagcatgcgtttaaaccgtttggaaacggtcagcgtgcgtgtatcggtcagcagttcgctcttcatagtgcaacgctggtacttggtatgatgctaaaacactttgactttgaagatcatacaaactacgagctcgttattaaagaatcgcggacgttaaaacctgaaggctttgtggtaaaagcaaaatcgaaaggcattccgcttggcggtattccttcacctagcactgaacagtctgctaaaaaagtacgcaaaaaggcagaaaacgctcataatacgccgctgcttgtgctatacggttcaaatgcgggaacagctgaaggaacggcgcgtgatttagcagatattgcaatgagcaaaggatttgcaccgcaggtcgcaacgcttgattcacacgccggtaatcttccgcgcgaaggagctgtattaattgtaacggcgtcttataacggtcatccgcctgataacgcaaagcaatttgtcgattggttagaccaagcgtctgcggatgaagtaaaaggcgttcgctactccgtatttggatgcggcgataaaaattgggcggggacgtatcaaaaagtgcctgcttttatcgatgaaacgcttgccgctaaaggggcagaaaacatcgctaagcgcggtgaagcagatgcaagcgacgactttgaaggcgcgtatgaagaatggcgtgatcatatgtggagtgacgtagcagcctactttggtctcgacattgaaaacagtgaagataataaatctactctttcacttcaatttgtcgacagcgcggcggatatgcctcttgcgaaaatgcacggtgcgttttcaacgaacgtcgtagcaagcaaagaacttcaacagcctggcagtgcacgaagcacgcgacatcttgaaattgaacttccaaaagaagcttcttatcaagaaggagatcatttaggtgttattcctcgctattatgaaggaatagtaaaccgtgtaacacagaggttcggcctaagcgcatcacagctgatccgtctggaagcagaagaagaaaaattagctcatttgccactcgctaaaacagtatccgtagaagagcttctgcaatacgtggagcttcaagatcctgttacgcgcacgcagcttcgcgcaatggctgctaaaacggtctgcccgccgcataaagtagagcttgaagccttgcttggcaagcaagcctacaaagaacaagtgctggcaaaacgtttaacaatgcttgaactgcttgaaaaatacccggcgtgtgaaatgagtttcagcgaatttatcgcccttctgccaagcatacgcccgcgctattactcgatttcttcatcacctcgtgtcgatctgaaacaagcaagcatcacggtcagcgttgtcagtggactggcgtggagcggatatggagaatataaaggaattgcgtcgaactatcttgctgagctgcaagaaggagatacgattacgtgctttatttccacaccgcagtcagagtttacgctgccaaaagaccctgaaacgccgcttatcatggtcggaccgggaacaggcgtcgcgccgtttagaggctttgtgcaggcgcgcaaacagctaaaagaacaaggacagtcacttggagaagcacatttatacttcggctgccgttcacctcatgaagactatctgtatcaagaagagcttgaaaacgcccaaagcgaaggcatcattctgcttcataccgctttttctcgcatgccgaatcagccgaaaacatacgttcagcacgtaatggaacaagacggcaagaaattgattgaacttcttgatcaaggagcgcacttctatatttgcggagacggaattcaaatggcacctgccgttgaagcaacgcttatgaaaagctatgctgacgttcaccaagtgagtgaagcagacgctcgcttatggctgcagcagctagaagaaaaaggccgatacgcaaaagacgtgtggctgggg

SEQ ID NO: 1174 - protein, 1049 aa, synthetic construct
  REGION 1..1049: note = variant of P450 oxidase from Bacillus megaterium
MTIKEMPQPKTFGELKNLPLLNTDKPVQALMRIADELGEIFKFEAPGSVTRYLSSQRLIKEACDESRFDKNLSQGLKFARDFVGDGLVTSWTHEPNWKKAHNILVPSFSQHAMGRYHAMMVDIAVQLVQKWERLNADEHIEVSEDMTRLTLDTIGLCLFNYRFNSFYRDTPHPFIVSVVRALDEVMNKLQRANPDDPAYDENKRQCQEDIKVMNDYVDKIIADRKARGEQSHDLLTQMLNGKDYETGEPLDDGNIRQQIITFLIAGHQTTSGLLSFALYFLVKNPRVLQKVAEEAARVLVDPVPSYKQVKQLKYVGMVLNEALRLWPVAPMFSLYAKEDTVLGGEYPLTKGDEVMVLVPQLHRDKTIWGDDVEEFRPERFENPSAIPQHAFKPFGNGQRACIGQQFALHSATLVLGMMLKHFDFEDHTNYELVIKESRTLKPEGFVVKAKSKGIPLGGIPSPSTEQSAKKVRKKAENAHNTPLLVLYGSNAGTAEGTARDLADIAMSKGFAPQVATLDSHAGNLPREGAVLIVTASYNGHPPDNAKQFVDWLDQASADEVKGVRYSVFGCGDKNWAGTYQKVPAFIDETLAAKGAENIAKRGEADASDDFEGAYEEWRDHMWSDVAAYFGLDIENSEDNKSTLSLQFVDSAADMPLAKMHGAFSTNVVASKELQQPGSARSTRHLEIELPKEASYQEGDHLGVIPRYYEGIVNRVTQRFGLSASQLIRLEAEEEKLAHLPLAKTVSVEELLQYVELQDPVTRTQLRAMAAKTVCPPHKVELEALLGKQAYKEQVLAKRLTMLELLEKYPACEMSFSEFIALLPSIRPRYYSISSSPRVDLKQASITVSVVSGLAWSGYGEYKGIASNYLAELQEGDTITCFISTPQSEFTLPKDPETPLIMVGPGTGVAPFRGFVQARKQLKEQGQSLGEAHLYFGCRSPHEDYLYQEELENAQSEGIILLHTAFSRMPNQPKTYVQHVMEQDGKKLIELLDQGAHFYICGDGIQMAPAVEATLMKSYADVHQVSEADARLWLQQLEEKGRYAKDVWLG

SEQ ID NO: 1175 - DNA, 3147 bp, synthetic construct
  misc_feature 1..3147: note = variant of P450 oxidase from Bacillus megaterium
  source 1..3147: mol_type = other DNA
atgacaattaaggaaatgcctcagcctaagacgtttggagaacttaaaaatttaccgttattaaatacagataaaccggttcaagctttgatgcgtattgcggatgaattaggagaaatctttaaattcgaggcgcctggtagcgtaacgcgctatttatcaagtcagcgtctaattaaagaagcatgcgatgaatcacgctttgataaaaacttaagtcaagggcttaaatttgcacgtgattttgttggagacgggctggttacaagctggacgcatgaaccgaattggaaaaaagcgcataatatcttagttccaagctttagtcagtgggcaatggggcgttatcatgcgatgatggtcgatatcgccgtgcagcttgttcaaaagtgggagcgtctaaatgcagatgagcatattgaagtatcggaagacatgacacgtttaacgcttgatacaattggtctttgcctgtttaactatcgctttaacagcttttaccgagatacgcctcatccatttattgtgagtgtggttcgtgcactggatgaagtaatgaacaagctgcagcgagcaaatccagacgacccagcttatgatgaaaacaagcgccagtgtcaagaagatatcaaggtgatgaacgactatgtagataaaattattgcagatcgcaaagcaaggggtgaacaaagtcatgatttattaacgcagatgctaaacggaaaagatccagaaacgggtgagccgcttgatgacgggaacattcgtcagcaaattattacattcttaattgcgggacaccaaacgacaagtggtcttttatcatttgcgctgtatttcttagtgaaaaatccacgtgtattacaaaaagtagcagaagaagcagcacgagttctagtagatcctgttccaagctacaaacaagtcaaacagcttaaatatgttggcatggtcttaaacgaagcgctgcgcttatggccagtagcgcctatgttttccctatatgcaaaagaagatacggtgcttggaggagaatatcctttaacgaaaggcgacgaagtaatggttctggtgcctcagcttcaccgtgataaaacaatttggggagacgatgtggaggagttccgtccagagcgttttgaaaatccaagtgcgattccgcagcatgcgtttaaaccgtttggaaacggtcagcgtgcgtgtatcggtcagcagttcgctcttcatagtgcaacgctggtacttggtatgatgctaaaacactttgactttgaagatcatacaaactacgagctcgttattaaagaatcgcggacgttaaaacctgaaggctttgtggtaaaagcaaaatcgaaaggcattccgcttggcggtattccttcacctagcactgaacagtctgctaaaaaagtacgcaaaaaggcagaaaacgctcataatacgccgctgcttgtgctatacggttcaaatgcgggaacagctgaaggaacggcgcgtgatttagcagatattgcaatgagcaaaggatttgcaccgcaggtcgcaacgcttgattcacacgccggtaatcttccgcgcgaaggagctgtattaattgtaacggcgtcttataacggtcatccgcctgataacgcaaagcaatttgtcgattggttagaccaagcgtctgcggatgaagtaaaaggcgttcgctactccgtatttggatgcggcgataaaaattgggcggggacgtatcaaaaagtgcctgcttttatcgatgaaacgcttgccgctaaaggggcagaaaacatcgctaagcgcggtgaagcagatgcaagcgacgactttgaaggcgcgtatgaagaatggcgtgatcatatgtggagtgacgtagcagcctactttggtctcgacattgaaaacagtgaagataataaatctactctttcacttcaatttgtcgacagcgcggcggatatgcctcttgcgaaaatgcacggtgcgttttcaacgaacgtcgtagcaagcaaagaacttcaacagcctggcagtgcacgaagcacgcgacatcttgaaattgaacttccaaaagaagcttcttatcaagaaggagatcatttaggtgttattcctcgctattatgaaggaatagtaaaccgtgtaacacagaggttcggcctaagcgcatcacagctgatccgtctggaagcagaagaagaaaaattagctcatttgccactcgctaaaacagtatccgtagaagagcttctgcaatacgtggagcttcaagatcctgttacgcgcacgcagcttcgcgcaatggctgctaaaacggtctgcccgccgcataaagtagagcttgaagccttgcttggcaagcaagcctacaaagaacaagtgctggcaaaacgtttaacaatgcttgaactgcttgaaaaatacccggcgtgtgaaatgagtttcagcgaatttatcgcccttctgccaagcatacgcccgcgctattactcgatttcttcatcacctcgtgtcgatctgaaacaagcaagcatcacggtcagcgttgtcagcggaccggcgtggagcggatatggagaatataaaggaattgcgtcgaactatcttgctgagctgcaagaaggagatacgattacgtgctttatttccacaccgcagtcagagtttacgctgccaaaagaccctgaaacgccgcttatcatggtcggaccgggaacaggcgtcgcgccgtttagaggctttgtgcaggcgcgcaaacagctaaaagaacaaggacagtcacttggagaagcacatttatacttcggctgccgttcacctcatgaagactatctgtatcaagaagagcttgaaaacgcccaaagcgaaggcatcattctgcttcataccgctttttctcgcatgccgaatcagccgaaaacatacgttcagcacgtaatggaacaagacggcaagaaattgattgaacttcttgatcaaggagcgcacttctatatttgcggagacggaattcaaatggcacctgccgttgaagcaacgcttatgaaaagctatgctgacgttcaccaagtgagtgaagcagacgctcgcttatggctgcagcagctagaagaaaaaggccgatacgcaaaagacgtgtggctgggg

SEQ ID NO: 1176 - protein, 1049 aa, synthetic construct
  REGION 1..1049: note = variant of P450 oxidase from Bacillus megaterium
MTIKEMPQPKTFGELKNLPLLNTDKPVQALMRIADELGEIFKFEAPGSVTRYLSSQRLIKEACDESRFDKNLSQGLKFARDFVGDGLVTSWTHEPNWKKAHNILVPSFSQWAMGRYHAMMVDIAVQLVQKWERLNADEHIEVSEDMTRLTLDTIGLCLFNYRFNSFYRDTPHPFIVSVVRALDEVMNKLQRANPDDPAYDENKRQCQEDIKVMNDYVDKIIADRKARGEQSHDLLTQMLNGKDPETGEPLDDGNIRQQIITFLIAGHQTTSGLLSFALYFLVKNPRVLQKVAEEAARVLVDPVPSYKQVKQLKYVGMVLNEALRLWPVAPMFSLYAKEDTVLGGEYPLTKGDEVMVLVPQLHRDKTIWGDDVEEFRPERFENPSAIPQHAFKPFGNGQRACIGQQFALHSATLVLGMMLKHFDFEDHTNYELVIKESRTLKPEGFVVKAKSKGIPLGGIPSPSTEQSAKKVRKKAENAHNTPLLVLYGSNAGTAEGTARDLADIAMSKGFAPQVATLDSHAGNLPREGAVLIVTASYNGHPPDNAKQFVDWLDQASADEVKGVRYSVFGCGDKNWAGTYQKVPAFIDETLAAKGAENIAKRGEADASDDFEGAYEEWRDHMWSDVAAYFGLDIENSEDNKSTLSLQFVDSAADMPLAKMHGAFSTNVVASKELQQPGSARSTRHLEIELPKEASYQEGDHLGVIPRYYEGIVNRVTQRFGLSASQLIRLEAEEEKLAHLPLAKTVSVEELLQYVELQDPVTRTQLRAMAAKTVCPPHKVELEALLGKQAYKEQVLAKRLTMLELLEKYPACEMSFSEFIALLPSIRPRYYSISSSPRVDLKQASITVSVVSGPAWSGYGEYKGIASNYLAELQEGDTITCFISTPQSEFTLPKDPETPLIMVGPGTGVAPFRGFVQARKQLKEQGQSLGEAHLYFGCRSPHEDYLYQEELENAQSEGIILLHTAFSRMPNQPKTYVQHVMEQDGKKLIELLDQGAHFYICGDGIQMAPAVEATLMKSYADVHQVSEADARLWLQQLEEKGRYAKDVWLG

SEQ ID NO: 1177 - DNA, 3147 bp, synthetic construct
  misc_feature 1..3147: note = variant of P450 oxidase from Bacillus megaterium
  source 1..3147: mol_type = other DNA
atgacaattaaggaaatgcctcagcctaagacgtttggagaacttaaaaatttaccgttattaaatacagataaaccggttcaagctttgatgcgtattgcggatgaattaggagaaatctttaaattcgaggcacctggtagcgtaacgcgctatttatcaagtcagcgtctaattaaagaagcatgcgatgaatcacgctttgataaaaacttaagtcaagggcttaaatttgcacgtgattttgttggagacgggctggttacaagctggacgcatgaaccgaattggaaaaaagcgcataatatcttagttccaagctttagtcagcgcgcaatggggcgttatcatgcgatgatggtcgatatcgccgtgcagcttgttcaaaagtgggagcgtctaaatgcagatgagcatattgaagtatcggaagacatgacacgtttaacgcttgatacaattggtctttgcctgtttaactatcgctttaacagcttttaccgagatacgcctcatccatttattgtgagtgtggttcgtgcactggatgaagtaatgaacaagctgcagcgagcaaatactgacgacccagcttatgatgaaaacaagcgccagtgtcaagaagatatcaaggtgatgaacgactatgtagataaaattattgcagatcgcaaagcaaggggtgaacaaagtcatgatttattaacgcagatgctaaacggaaaagattatgaaacgggtgagccgcttgatgacgggaatattcgtcagcaaattattacattcttaattgcgggacaccaaacgacaagtggtcttttatcatttgcgctgtatttcttagtgaaaaatccacgtgtattacaaaaagtagcagaagaagcagcacgagttctagtagatcctgttccaagctacaaacaagtcaaacagcttaaatatgttggcatggtcttaaacgaagcgctgcgcttatggccagtagcgcctatgttttccctatatgcaaaagaagatacggtgcttggaggagaatattcgttaacgaaaggcgacgaagtaatggttctggtgcctcagcttcaccgtgataaaacaatttggggagacgatgtggaggagttccgtccagagcgttttgaaaatccaagtgcgattccgcagcatgcgtttaaaccgtttggaaacggtcagcgtgcgtgtatcggtcagcagttcgctcttcatagtgcaacgctggtacttggtatgatgctaaaacactttgactttgaagatcatacaaactacgagctcgttattaaagaatcgcggacgttaaaacctgaaggctttgtggtaaaagcaaaatcgaaaggcattccgcttggcggtattccttcacctagcactgaacagtctgctaaaaaagtacgcaaaaaggcagaaaacgctcataatacgccgctgcttgtgctatacggttcaaatgcgggaacagctgaaggaacggcgcgtgatttagcagatattgcaatgagcaaaggatttgcaccgcaggtcgcaacgcttgattcacacgccggtaatcttccgcgcgaaggagctgtattaattgtaacggcgtcttataacggtcatccgcctgataacgcaaagcaatttgtcgattggttagaccaagcgtctgcggatgaagtaaaaggcgttcgctactccgtatttggatgcggcgataaaaattgggcggggacgtatcaaaaagtgcctgcttttatcgatgaaacgcttgccgctaaaggggcagaaaacatcgctaagcgcggtgaagcagatgcaagcgacgactttgaaggcgcgtatgaagaatggcgtgatcatatgtggagtgacgtagcagcctactttggtctcgacattgaaaacagtgaagataataaatctactctttcacttcaatttgtcgacagcgcggcggatatgcctcttgcgaaaatgcacggtgcgttttcaacgaacgtcgtagcaagcaaagaacttcaacagcctggcagtgcacgaagcacgcgacatcttgaaattgaacttccaaaagaagcttcttatcaagaaggagatcatttaggtgttattcctcgctattatgaaggaatagtaaaccgtgtaacacagaggttcggcctaagcgcatcacagctgatccgtctggaagcagaagaagaaaaattagctcatttgccactcgctaaaacagtatccgtagaagagcttctgcaatacgtggagcttcaagatcctgttacgcgcacgcagcttcgcgcaatggctgctaaaacggtctgcccgccgcataaagtagagcttgaagccttgcttggcaagcaagcctacaaagaacaagtgctggcaaaacgtttaacaatgcttgaactgcttgaaaaatacccggcgtgtgaaatgagtttcagcgaatttatcgcccttctgccaagcatacgcccgcgctattactcgatttcttcatcacctcgtgtcgatctgaaacaagcaagcatcacggtcagcgttgtcagtggactggcgtggagcggatatggagaatataaaggaattgcgtcgaactatcttgctgagctgcaagaaggagatacgattacgtgctttatttccacaccgcagtcagagtttacgctgccaaaagaccctgaaacgccgcttatcatggtcggaccgggaacaggcgtcgcgccgtttagaggctttgtgcaggcgcgcaaacagctaaaagaacaaggacagtcacttggagaagcacatttatacttcggctgccgttcacctcatgaagactatctgtatcaagaagagcttgaaaacgcccaaagcgaaggcatcattctgcttcataccgctttttctcgcatgccgaatcagccgaaaacatacgttcagcacgtaatggaacaagacggcaagaaattgattgaacttcttgatcaaggagcgcacttctatatttgcggagacggaattcaaatggcacctgccgttgaagcaacgcttatgaaaagctatgctgacgttcaccaagtgagtgaagcagacgctcgcttatggctgcagcagctagaagaaaaaggccgatacgcaaaagacgtgtggctgggg

SEQ ID NO: 1178 - protein, 1049 aa, synthetic construct
  REGION 1..1049: note = variant of P450 oxidase from Bacillus megaterium
MTIKEMPQPKTFGELKNLPLLNTDKPVQALMRIADELGEIFKFEAPGSVTRYLSSQRLIKEACDESRFDKNLSQGLKFARDFVGDGLVTSWTHEPNWKKAHNILVPSFSQRAMGRYHAMMVDIAVQLVQKWERLNADEHIEVSEDMTRLTLDTIGLCLFNYRFNSFYRDTPHPFIVSVVRALDEVMNKLQRANTDDPAYDENKRQCQEDIKVMNDYVDKIIADRKARGEQSHDLLTQMLNGKDYETGEPLDDGNIRQQIITFLIAGHQTTSGLLSFALYFLVKNPRVLQKVAEEAARVLVDPVPSYKQVKQLKYVGMVLNEALRLWPVAPMFSLYAKEDTVLGGEYSLTKGDEVMVLVPQLHRDKTIWGDDVEEFRPERFENPSAIPQHAFKPFGNGQRACIGQQFALHSATLVLGMMLKHFDFEDHTNYELVIKESRTLKPEGFVVKAKSKGIPLGGIPSPSTEQSAKKVRKKAENAHNTPLLVLYGSNAGTAEGTARDLADIAMSKGFAPQVATLDSHAGNLPREGAVLIVTASYNGHPPDNAKQFVDWLDQASADEVKGVRYSVFGCGDKNWAGTYQKVPAFIDETLAAKGAENIAKRGEADASDDFEGAYEEWRDHMWSDVAAYFGLDIENSEDNKSTLSLQFVDSAADMPLAKMHGAFSTNVVASKELQQPGSARSTRHLEIELPKEASYQEGDHLGVIPRYYEGIVNRVTQRFGLSASQLIRLEAEEEKLAHLPLAKTVSVEELLQYVELQDPVTRTQLRAMAAKTVCPPHKVELEALLGKQAYKEQVLAKRLTMLELLEKYPACEMSFSEFIALLPSIRPRYYSISSSPRVDLKQASITVSVVSGLAWSGYGEYKGIASNYLAELQEGDTITCFISTPQSEFTLPKDPETPLIMVGPGTGVAPFRGFVQARKQLKEQGQSLGEAHLYFGCRSPHEDYLYQEELENAQSEGIILLHTAFSRMPNQPKTYVQHVMEQDGKKLIELLDQGAHFYICGDGIQMAPAVEATLMKSYADVHQVSEADARLWLQQLEEKGRYAKDVWLG

SEQ ID NO: 1179 - DNA, 3147 bp, synthetic construct
  misc_feature 1..3147: note = variant of P450 oxidase from Bacillus megaterium
  source 1..3147: mol_type = other DNA
atgacaattaaggaaatgcctcagcctaagacgtttggagaacttaaaaatttaccgttattaaatacagataaaccggttcaagctttgatgcgtattgcggatgaattaggagaaatctttaaattcgaggcacctggtagcgtaacgcgctatttatcaagtcagcgtctaattaaagaagcatgcgatgaatcacgctttgataaaaacttaagtcaagggcttaaatttgcacgtgattttgttggagacgggctggttacaagctggacgcatgaaccgaattggaaaaaagcgcataatatcttagttccaagctttagtcagctggcaatggggcgttatcatgcgatgatggtcgatatcgccgtgcagctggttcaaaagtgggagcgtctaaatgcagatgagcatattgaagtatcggaagacatgacacgtttaacgcttgatacaattggtctttgcctgtttaactatcgctttaacagcttttaccgagatacgcctcatccatttattgtgagtgtggttcgtgcactggatgaagtaatgaacaagctgcagcgagcaaatccagacgacccagcttatgatgaaaacaagcgccagtgtcaagaagatatcaaggtgatgaacgactatgtagataaaattattgcagatcgcaaagcaaggggtgaacaaagtcatgatttattaacgcagatgctaaacggaaaagatcgtgaaacgggtgagccgcttgatgacgggaacattcgtcagcaaattattacattcttaattgcgggacaccaaacgacaagtggtcttttatcatttgcgctgtatttcttagtgaaaaatccacgtgtattacaaaaagtagcagaagaagcagcacgagttctagtagatcctgttccaagctacaaacaagtcaaacagcttaaatatgttggcatggtcttaaacgaagcgctgcgcttatggccagtagcgcctatgttttccctatatgcaaaagaagatacggtgcttggaggagaatatcctttaacgaaaggcgacgaagtaatggttctggtgcctcagcttcaccgtgataaaacaatttggggagacgatgtggaggagttccgtccagagcgttttgaaaatccaagtgcgattccgcagcatgcgtttaaaccgtttggaaacggtcagcgtgcgtgtatcggtcagcagttcgctcttcatagtgcaacgctggtacttggtatgatgctaaaacactttgactttgaagatcatacaaactacgagctcgttattaaagaatcgcggacgttaaaacctgaaggctttgtggtaaaagcaaaatcgaaaggcattccgcttggcggtattccttcacctagcactgaacagtctgctaaaaaagtacgcaaaaaggcagaaaacgctcataatacgccgctgcttgtgctatacggttcaaatgcgggaacagctgaaggaacggcgcgtgatttagcagatattgcaatgagcaaaggatttgcaccgcaggtcgcaacgcttgattcacacgccggtaatcttccgcgcgaaggagctgtattaattgtaacggcgtcttataacggtcatccgcctgataacgcaaagcaatttgtcgattggttagaccaagcgtctgcggatgaagtaaaaggcgttcgctactccgtatttggatgcggcgataaaaattgggcggggacgtatcaaaaagtgcctgcttttatcgatgaaacgcttgccgctaaaggggcagaaaacatcgctaagcgcggtgaagcagatgcaagcgacgactttgaaggcgcgtatgaagaatggcgtgatcatatgtggagtgacgtagcagcctactttggtctcgacattgaaaacagtgaagataataaatctactctttcacttcaatttgtcgacagcgcggcggatatgcctcttgcgaaaatgcacggtgcgttttcaacgaacgtcgtagcaagcaaagaacttcaacagcctggcagtgcacgaagcacgcgacatcttgaaattgaacttccaaaagaagcttcttatcaagaaggagatcatttaggtgttattcctcgctattatgaaggaatagtaaaccgtgtaacacagaggttcggcctaagcgcatcacagctgatccgtctggaagcagaagaagaaaaattagctcatttgccactcgctaaaacagtatccgtagaagagcttctgcaatacgtggagcttcaagatcctgttacgcgcacgcagcttcgcgcaatggctgctaaaacggtctgcccgccgcataaagtagagcttgaagccttgcttggcaagcaagcctacaaagaacaagtgctggcaaaacgtttaacaatgcttgaactgcttgaaaaatacccggcgtgtgaaatgagtttcagcgaatttatcgcccttctgccaagcatacgcccgcgctattactcgatttcttcatcacctcgtgtcgatctgaaacaagcaagcatcacggtcagcgttgtcagtggaccggcgtggagcggatatggagaatataaaggaattgcgtcgaactatcttgctgagctgcaagaaggagatacgattacgtgctttatttccacaccgcagtcagagtttacgctgccaaaagaccctgaaacgccgcttatcatggtcggaccgggaacaggcgtcgcgccgtttagaggctttgtgcaggcgcgcaaacagctaaaagaacaaggacagtcacttggagaagcacatttatacttcggctgccgttcacctcatgaagactatctgtatcaagaagagcttgaaaacgcccaaagcgaaggcatcattctgcttcataccgctttttctcgcatgccgaatcagccgaaaacatacgttcagcacgtaatggaacaagacggcaagaaattgattgaacttcttgatcaaggagcgcacttctatatttgcggagacggaattcaaatggcacctgccgttgaagcaacgcttatgaaaagctatgctgacgttcaccaagtgagtgaagcagacgctcgcttatggctgcagcagctagaagaaaaaggccgatacgcaaaagacgtgtggctgggg

SEQ ID NO: 1180 - protein, 1049 aa, synthetic construct
  REGION 1..1049: note = variant of P450 oxidase from Bacillus megaterium
MTIKEMPQPKTFGELKNLPLLNTDKPVQALMRIADELGEIFKFEAPGSVTRYLSSQRLIKEACDESRFDKNLSQGLKFARDFVGDGLVTSWTHEPNWKKAHNILVPSFSQLAMGRYHAMMVDIAVQLVQKWERLNADEHIEVSEDMTRLTLDTIGLCLFNYRFNSFYRDTPHPFIVSVVRALDEVMNKLQRANPDDPAYDENKRQCQEDIKVMNDYVDKIIADRKARGEQSHDLLTQMLNGKDRETGEPLDDGNIRQQIITFLIAGHQTTSGLLSFALYFLVKNPRVLQKVAEEAARVLVDPVPSYKQVKQLKYVGMVLNEALRLWPVAPMFSLYAKEDTVLGGEYPLTKGDEVMVLVPQLHRDKTIWGDDVEEFRPERFENPSAIPQHAFKPFGNGQRACIGQQFALHSATLVLGMMLKHFDFEDHTNYELVIKESRTLKPEGFVVKAKSKGIPLGGIPSPSTEQSAKKVRKKAENAHNTPLLVLYGSNAGTAEGTARDLADIAMSKGFAPQVATLDSHAGNLPREGAVLIVTASYNGHPPDNAKQFVDWLDQASADEVKGVRYSVFGCGDKNWAGTYQKVPAFIDETLAAKGAENIAKRGEADASDDFEGAYEEWRDHMWSDVAAYFGLDIENSEDNKSTLSLQFVDSAADMPLAKMHGAFSTNVVASKELQQPGSARSTRHLEIELPKEASYQEGDHLGVIPRYYEGIVNRVTQRFGLSASQLIRLEAEEEKLAHLPLAKTVSVEELLQYVELQDPVTRTQLRAMAAKTVCPPHKVELEALLGKQAYKEQVLAKRLTMLELLEKYPACEMSFSEFIALLPSIRPRYYSISSSPRVDLKQASITVSVVSGPAWSGYGEYKGIASNYLAELQEGDTITCFISTPQSEFTLPKDPETPLIMVGPGTGVAPFRGFVQARKQLKEQGQSLGEAHLYFGCRSPHEDYLYQEELENAQSEGIILLHTAFSRMPNQPKTYVQHVMEQDGKKLIELLDQGAHFYICGDGIQMAPAVEATLMKSYADVHQVSEADARLWLQQLEEKGRYAKDVWLG

SEQ ID NO: 1181 - DNA, 3147 bp, synthetic construct
  misc_feature 1..3147: note = variant of P450 oxidase from Bacillus megaterium
  source 1..3147: mol_type = other DNA
atgacaattaaggaaatgcctcagcctaagacgtttggagaacttaaaaatttaccgttattaaatacagataaaccggttcaagctttgatgcgtattgcggatgaattaggagaaatctttaaattcgaggcgcctggtagcgtaacgcgctatttatcaagtcagcgtctaattaaagaagcatgcgatgaatcacgctttgataaaaacttaagtcaagggcttaaatttgcacgtgattttgttggagacgggctggttacaagctggacgcatgaaccgaattggaaaaaagcgcataatatcttagttccaagctttagtcagcacgcaatggggcgttatcatgcgatgatggtcgatatcgccgtgcagcttgttcaaaagtgggagcgtctaaatgcagatgagcatattgaagtatcggaagacatgacacgtttaacgcttgatacaattggtctttgcctgtttaactatcgctttaacagcttttaccgagatacgcctcatccatttattgtgagtgtggttcgtgcactggatgaagtaatgaacaagctgcagcgagcaaatccagacgacccagcttatgatgaaaacaagcgccagtgtcaagaagatatcaaggtgatgaacgactatgtagataaaattattgcagatcgcaaagcaaggggtgaacaaagtcatgatttattaggtcagatgctaaacggaaaagattatgaaacgggtgagccgcttgatgacgggaatattcgtcagcaaattattacattcttaattgcgggacaccaaacgacaagtggtcttttatcatttgcgctgtatttcttagtgaaaaatccacgtgtattacaaaaagtagcagaagaagcagcacgagttctagtagatcctgttccaagctacaaacaagtcaaacagcttaaatatgttggcatggtcttaaacgaagcgctgcgcttatggccagtagcgcctatgttttccctatatgcaaaagaagatacggtgcttggaggagaatatccgttaacgaaaggcgacgaagtaatggttctggtgcctcagcttcaccgtgataaaacaatttggggagacgatgtggaggagttccgtccagagcgttttgaaaatccaagtgcgattccgcagcatgcgtttaaaccgtttggaaacggtcagcgtgcgtgtatcggtcagcagttcgctcttcatagtgcaacgctggtacttggtatgatgctaaaacactttgactttgaagatcatacaaactacgagctcgttattaaagaatcgcggacgttaaaacctgaaggctttgtggtaaaagcaaaatcgaaaggcattccgcttggcggtattccttcacctagcactgaacagtctgctaaaaaagtacgcaaaaaggcagaaaacgctcataatacgccgctgcttgtgctatacggttcaaatgcgggaacagctgaaggaacggcgcgtgatttagcagatattgcaatgagcaaaggatttgcaccgcaggtcgcaacgcttgattcacacgccggtaatcttccgcgcgaaggagctgtattaattgtaacggcgtcttataacggtcatccgcctgataacgcaaagcaatttgtcgattggttagaccaagcgtctgcggatgaagtaaaaggcgttcgctactccgtatttggatgcggcgataaaaattgggcggggacgtatcaaaaagtgcctgcttttatcgatgaaacgcttgccgctaaaggggcagaaaacatcgctaagcgcggtgaagcagatgcaagcgacgactttgaaggcgcgtatgaagaatggcgtgatcatatgtggagtgacgtagcagcctactttggtctcgacattgaaaacagtgaagataataaatctactctttcacttcaatttgtcgacagcgcggcggatatgcctcttgcgaaaatgcacggtgcgttttcaacgaacgtcgtagcaagcaaagaacttcaacagcctggcagtgcacgaagcacgcgacatcttgaaattgaacttccaaaagaagcttcttatcaagaaggagatcatttaggtgttattcctcgctattatgaaggaatagtaaaccgtgtaacacagaggttcggcctaagcgcatcacagctgatccgtctggaagcagaagaagaaaaattagctcatttgccactcgctaaaacagtatccgtagaagagcttctgcaatacgtggagcttcaagatcctgttacgcgcacgcagcttcgcgcaatggctgctaaaacggtctgcccgccgcataaagtagagcttgaagccttgcttggcaagcaagcctacaaagaacaagtgctggcaaaacgtttaacaatgcttgaactgcttgaaaaatacccggcgtgtgaaatgagtttcagcgaatttatcgcccttctgccaagcatacgcccgcgctattactcgatttcttcatcacctcgtgtcgatctgaaacaagcaagcatcacggtcagcgttgtcagtggaccggcgtggagcggatatggagaatataaaggaattgcgtcgaactatcttgctgagctgcaagaaggagatacgattacgtgctttatttccacaccgcagtcagagtttacgctgccaaaagaccctgaaacgccgcttatcatggtcggaccgggaacaggcgtcgcgccgtttagaggctttgtgcaggcgcgcaaacagctaaaagaacaaggacagtcacttggagaagcacatttatacttcggctgccgttcacctcatgaagactatctgtatcaagaagagcttgaaaacgcccaaagcgaaggcatcattctgcttcataccgctttttctcgcatgccgaatcagccgaaaacatacgttcagcacgtaatggaacaagacggcaagaaattgattgaacttcttgatcaaggagcgcacttctatatttgcggagacggaattcaaatggcacctgccgttgaagcaacgcttatgaaaagctatgctgacgttcaccaagtgagtgaagcagacgctcgcttatggctgcagcagctagaagaaaaaggccgatacgcaaaagacgtgtggctgggg

SEQ ID NO: 1182 - protein, 1049 aa, synthetic construct
  REGION 1..1049: note = variant of P450 oxidase from Bacillus megaterium
MTIKEMPQPKTFGELKNLPLLNTDKPVQALMRIADELGEIFKFEAPGSVTRYLSSQRLIKEACDESRFDKNLSQGLKFARDFVGDGLVTSWTHEPNWKKAHNILVPSFSQHAMGRYHAMMVDIAVQLVQKWERLNADEHIEVSEDMTRLTLDTIGLCLFNYRFNSFYRDTPHPFIVSVVRALDEVMNKLQRANPDDPAYDENKRQCQEDIKVMNDYVDKIIADRKARGEQSHDLLGQMLNGKDYETGEPLDDGNIRQQIITFLIAGHQTTSGLLSFALYFLVKNPRVLQKVAEEAARVLVDPVPSYKQVKQLKYVGMVLNEALRLWPVAPMFSLYAKEDTVLGGEYPLTKGDEVMVLVPQLHRDKTIWGDDVEEFRPERFENPSAIPQHAFKPFGNGQRACIGQQFALHSATLVLGMMLKHFDFEDHTNYELVIKESRTLKPEGFVVKAKSKGIPLGGIPSPSTEQSAKKVRKKAENAHNTPLLVLYGSNAGTAEGTARDLADIAMSKGFAPQVATLDSHAGNLPREGAVLIVTASYNGHPPDNAKQFVDWLDQASADEVKGVRYSVFGCGDKNWAGTYQKVPAFIDETLAAKGAENIAKRGEADASDDFEGAYEEWRDHMWSDVAAYFGLDIENSEDNKSTLSLQFVDSAADMPLAKMHGAFSTNVVASKELQQPGSARSTRHLEIELPKEASYQEGDHLGVIPRYYEGIVNRVTQRFGLSASQLIRLEAEEEKLAHLPLAKTVSVEELLQYVELQDPVTRTQLRAMAAKTVCPPHKVELEALLGKQAYKEQVLAKRLTMLELLEKYPACEMSFSEFIALLPSIRPRYYSISSSPRVDLKQASITVSVVSGPAWSGYGEYKGIASNYLAELQEGDTITCFISTPQSEFTLPKDPETPLIMVGPGTGVAPFRGFVQARKQLKEQGQSLGEAHLYFGCRSPHEDYLYQEELENAQSEGIILLHTAFSRMPNQPKTYVQHVMEQDGKKLIELLDQGAHFYICGDGIQMAPAVEATLMKSYADVHQVSEADARLWLQQLEEKGRYAKDVWLG

SEQ ID NO: 1183 - DNA, 3147 bp, synthetic construct
  misc_feature 1..3147: note = variant of P450 oxidase from Bacillus megaterium
  source 1..3147: mol_type = other DNA
atgacaattaaggaaatgcctcagcctaagacgtttggagaacttaaaaatttaccgttattaaatacagataaaccggttcaagctttgatgcgtattgcggatgaattaggagaaatctttaaattcgaggcacctggtagcgtaacgcgctatttatcaagtcagcgtctaattaaagaagcatgcgatgaatcacgctttgataaaaacttaagtcaagggcttaaatttgcacgtgattttgttggagacgggctggttacaagctggacgcatgaaccgaattggaaaaaagcgcataatatcttagttccaagctttagtcagctggcaatggggcgttatcatgcgatgatggtcgatatcgccgtgcagctggttcaaaagtgggagcgtctaaatgcagatgagcatattgaagtatcggaagacatgacacgtttaacgcttgatacaattggtctttgcctgtttaactatcgctttaacagcttttaccgagatacgcctcatccatttattgtgagtgtggttcgtgcactggatgaagtaatgaacaagctgcagcgagcaaatccagacgacccagcttatgatgaaaacaagcgccagtgtcaagaagatatcaaggtgatgaacgactatgtagataaaattattgcagatcgcaaagcaaggggtgaacaaagtcatgatttattaacgcagatgctaaacggaaaagatccagaaacgggtgagccgcttgatgacgggaacattcgtcagcaaattattacattcttaattgcgggacaccaaacgacaagtggtcttttatcatttgcgctgtatttcttagtgaaaaatccacgtgtattacaaaaagtagcagaagaagcagcacgagttctagtagatcctgttccaagctacaaacaagtcaaacagcttaaatatgttggcatggtcttaaacgaagcgctgcgcttatggccagtagcgcctatgttttccctatatgcaaaagaagatacggtgcttggaggagaatatcctttaacgaaaggcgacgaagtaatggttctggtgcctcagcttcaccgtgataaaacaatttggggagacgatgtggaggagttccgtccagagcgttttgaaaatccaagtgcgattccgcagcatgcgtttaaaccgtttggaaacggtcagcgtgcgtgtatcggtcagcagttcgctcttcatagtgcaacgctggtacttggtatgatgctaaaacactttgactttgaagatcatacaaactacgagctcgttattaaagaatcgcggacgttaaaacctgaaggctttgtggtaaaagcaaaatcgaaaggcattccgcttggcggtattccttcacctagcactgaacagtctgctaaaaaagtacgcaaaaaggcagaaaacgctcataatacgccgctgcttgtgctatacggttcaaatgcgggaacagctgaaggaacggcgcgtgatttagcagatattgcaatgagcaaaggatttgcaccgcaggtcgcaacgcttgattcacacgccggtaatcttccgcgcgaaggagctgtattaattgtaacggcgtcttataacggtcatccgcctgataacgcaaagcaatttgtcgattggttagaccaagcgtctgcggatgaagtaaaaggcgttcgctactccgtatttggatgcggcgataaaaattgggcggggacgtatcaaaaagtgcctgcttttatcgatgaaacgcttgccgctaaaggggcagaaaacatcgctaagcgcggtgaagcagatgcaagcgacgactttgaaggcgcgtatgaagaatggcgtgatcatatgtggagtgacgtagcagcctactttggtctcgacattgaaaacagtgaagataataaatctactctttcacttcaatttgtcgacagcgcggcggatatgcctcttgcgaaaatgcacggtgcgttttcaacgaacgtcgtagcaagcaaagaacttcaacagcctggcagtgcacgaagcacgcgacatcttgaaattgaacttccaaaagaagcttcttatcaagaaggagatcatttaggtgttattcctcgctattatgaaggaatagtaaaccgtgtaacacagaggttcggcctaagcgcatcacagctgatccgtctggaagcagaagaagaaaaattagctcatttgccactcgctaaaacagtatccgtagaagagcttctgcaatacgtggagcttcaagatcctgttacgcgcacgcagcttcgcgcaatggctgctaaaacggtctgcccgccgcataaagtagagcttgaagccttgcttggcaagcaagcctacaaagaacaagtgctggcaaaacgtttaacaatgcttgaactgcttgaaaaatacccggcgtgtgaaatgagtttcagcgaatttatcgcccttctgccaagcatacgcccgcgctattactcgatttcttcatcacctcgtgtcgatctgaaacaagcaagcatcacggtcagcgttgtcagtggactggcgtggagcggatatggagaatataaaggaattgcgtcgaactatcttgctgagctgcaagaaggagatacgattacgtgctttatttccacaccgcagtcagagtttacgctgccaaaagaccctgaaacgccgcttatcatggtcggaccgggaacaggcgtcgcgccgtttagaggctttgtgcaggcgcgcaaacagctaaaagaacaaggacagtcacttggagaagcacatttatacttcggctgccgttcacctcatgaagactatctgtatcaagaagagcttgaaaacgcccaaagcgaaggcatcattctgcttcataccgctttttctcgcatgccgaatcagccgaaaacatacgttcagcacgtaatggaacaagacggcaagaaattgattgaacttcttgatcaaggagcgcacttctatatttgcggagacggaattcaaatggcacctgccgttgaagcaacgcttatgaaaagctatgctgacgttcaccaagtgagtgaagcagacgctcgcttatggctgcagcagctagaagaaaaaggccgatacgcaaaagacgtgtggctgggg

SEQ ID NO: 1184 - protein, 1049 aa, synthetic construct
  REGION 1..1049: note = variant of P450 oxidase from Bacillus megaterium
MTIKEMPQPKTFGELKNLPLLNTDKPVQALMRIADELGEIFKFEAPGSVTRYLSSQRLIKEACDESRFDKNLSQGLKFARDFVGDGLVTSWTHEPNWKKAHNILVPSFSQLAMGRYHAMMVDIAVQLVQKWERLNADEHIEVSEDMTRLTLDTIGLCLFNYRFNSFYRDTPHPFIVSVVRALDEVMNKLQRANPDDPAYDENKRQCQEDIKVMNDYVDKIIADRKARGEQSHDLLTQMLNGKDPETGEPLDDGNIRQQIITFLIAGHQTTSGLLSFALYFLVKNPRVLQKVAEEAARVLVDPVPSYKQVKQLKYVGMVLNEALRLWPVAPMFSLYAKEDTVLGGEYPLTKGDEVMVLVPQLHRDKTIWGDDVEEFRPERFENPSAIPQHAFKPFGNGQRACIGQQFALHSATLVLGMMLKHFDFEDHTNYELVIKESRTLKPEGFVVKAKSKGIPLGGIPSPSTEQSAKKVRKKAENAHNTPLLVLYGSNAGTAEGTARDLADIAMSKGFAPQVATLDSHAGNLPREGAVLIVTASYNGHPPDNAKQFVDWLDQASADEVKGVRYSVFGCGDKNWAGTYQKVPAFIDETLAAKGAENIAKRGEADASDDFEGAYEEWRDHMWSDVAAYFGLDIENSEDNKSTLSLQFVDSAADMPLAKMHGAFSTNVVASKELQQPGSARSTRHLEIELPKEASYQEGDHLGVIPRYYEGIVNRVTQRFGLSASQLIRLEAEEEKLAHLPLAKTVSVEELLQYVELQDPVTRTQLRAMAAKTVCPPHKVELEALLGKQAYKEQVLAKRLTMLELLEKYPACEMSFSEFIALLPSIRPRYYSISSSPRVDLKQASITVSVVSGLAWSGYGEYKGIASNYLAELQEGDTITCFISTPQSEFTLPKDPETPLIMVGPGTGVAPFRGFVQARKQLKEQGQSLGEAHLYFGCRSPHEDYLYQEELENAQSEGIILLHTAFSRMPNQPKTYVQHVMEQDGKKLIELLDQGAHFYICGDGIQMAPAVEATLMKSYADVHQVSEADARLWLQQLEEKGRYAKDVWLG

SEQ ID NO: 1185 - DNA, 3147 bp, synthetic construct
  misc_feature 1..3147: note = variant of P450 oxidase from Bacillus megaterium
  source 1..3147: mol_type = other DNA
atgacaattaaggaaatgcctcagcctaagacgtttggagaacttaaaaatttaccgttattaaatacagataaaccggttcaagctttgatgcgtattgcggatgaattaggagaaatctttaaattcgaggcacctggtagcgtaacgcgctatttatcaagtcagcgtctaattaaagaagcatgcgatgaatcacgctttgataaaaacttaagtcaagggcttaaatttgcacgtgattttgttggagacgggctggttacaagctggacgcatgaaccgaattggaaaaaagcgcataatatcttagttccaagctttagtcagcgcgcaatggggcgttatcatgcgatgatggtcgatatcgccgtgcagctggttcaaaagtgggagcgtctaaatgcagatgagcatattgaagtatcggaagacatgacacgtttaacgcttgatacaattggtctttgcctgtttaactatcgctttaacagcttttaccgagatacgcctcatccatttattgtgagtgtggttcgtgcactggatgaagtaatgaacaagctgcagcgagcaaatactgacgacccagcttatgatgaaaacaagcgccagtgtcaagaagatatcaaggtgatgaacgactatgtagataaaattattgcagatcgcaaagcaaggggtgaacaaagtcatgatttattaacgcagatgctaaacggaaaagatcctgaaacgggtgagccgcttgatgacgggaacattcgtcagcaaattattacattcttaattgcgggacaccaaacgacaagtggtcttttatcatttgcgctgtatttcttagtgaaaaatccacgtgtattacaaaaagtagcagaagaagcagcacgagttctagtagatcctgttccaagctacaaacaagtcaaacagcttaaatatgttggcatggtcttaaacgaagcgctgcgcttatggccagtagcgcctatgttttccctatatgcaaaagaagatacggtgcttggaggagaatattcgttaacgaaaggcgacgaagtaatggttctggtgcctcagcttcaccgtgataaaacaatttggggagacgatgtggaggagttccgtccagagcgttttgaaaatccaagtgcgattccgcagcatgcgtttaaaccgtttggaaacggtcagcgtgcgtgtatcggtcagcagttcgctcttcatagtgcaacgctggtacttggtatgatgctaaaacactttgactttgaagatcatacaaactacgagctcgttattaaagaatcgcggacgttaaaacctgaaggctttgtggtaaaagcaaaatcgaaaggcattccgcttggcggtattccttcacctagcactgaacagtctgctaaaaaagtacgcaaaaaggcagaaaacgctcataatacgccgctgcttgtgctatacggttcaaatgcgggaacagctgaaggaacggcgcgtgatttagcagatattgcaatgagcaaaggatttgcaccgcaggtcgcaacgcttgattcacacgccggtaatcttccgcgcgaaggagctgtattaattgtaacggcgtcttataacggtcatccgcctgataacgcaaagcaatttgtcgattggttagaccaagcgtctgcggatgaagtaaaaggcgttcgctactccgtatttggatgcggcgataaaaattgggcggggacgtatcaaaaagtgcctgcttttatcgatgaaacgcttgccgctaaaggggcagaaaacatcgctaagcgcggtgaagcagatgcaagcgacgactttgaaggcgcgtatgaagaatggcgtgatcatatgtggagtgacgtagcagcctactttggtctcgacattgaaaacagtgaagataataaatctactctttcacttcaatttgtcgacagcgcggcggatatgcctcttgcgaaaatgcacggtgcgttttcaacgaacgtcgtagcaagcaaagaacttcaacagcctggcagtgcacgaagcacgcgacatcttgaaattgaacttccaaaagaagcttcttatcaagaaggagatcatttaggtgttattcctcgctattatgaaggaatagtaaaccgtgtaacacagaggttcggcctaagcgcatcacagctgatccgtctggaagcagaagaagaaaaattagctcatttgccactcgctaaaacagtatccgtagaagagcttctgcaatacgtggagcttcaagatcctgttacgcgcacgcagcttcgcgcaatggctgctaaaacggtctgcccgccgcataaagtagagcttgaagccttgcttggcaagcaagcctacaaagaacaagtgctggcaaaacgtttaacaatgcttgaactgcttgaaaaatacccggcgtgtgaaatgagtttcagcgaatttatcgcccttctgccaagcatacgcccgcgctattactcgatttcttcatcacctcgtgtcgatctgaaacaagcaagcatcacggtcagcgttgtcagtggactggcgtggagcggatatggagaatataaaggaattgcgtcgaactatcttgctgagctgcaagaaggagatacgattacgtgctttatttccacaccgcagtcagagtttacgctgccaaaagaccctgaaacgccgcttatcatggtcggaccgggaacaggcgtcgcgccgtttagaggctttgtgcaggcgcgcaaacagctaaaagaacaaggacagtcacttggagaagcacatttatacttcggctgccgttcacctcatgaagactatctgtatcaagaagagcttgaaaacgcccaaagcgaaggcatcattctgcttcataccgctttttctcgcatgccgaatcagccgaaaacatacgttcagcacgtaatggaacaagacggcaagaaattgattgaacttcttgatcaaggagcgcacttctatatttgcggagacggaattcaaatggcacctgccgttgaagcaacgcttatgaaaagctatgctgacgttcaccaagtgagtgaagcagacgctcgcttatggctgcagcagctagaagaaaaaggccgatacgcaaaagacgtgtggctgggg

SEQ ID NO: 1186 - protein, 1049 aa, synthetic construct
  REGION 1..1049: note = variant of P450 oxidase from Bacillus megaterium
MTIKEMPQPKTFGELKNLPLLNTDKPVQALMRIADELGEIFKFEAPGSVTRYLSSQRLIKEACDESRFDKNLSQGLKFARDFVGDGLVTSWTHEPNWKKAHNILVPSFSQRAMGRYHAMMVDIAVQLVQKWERLNADEHIEVSEDMTRLTLDTIGLCLFNYRFNSFYRDTPHPFIVSVVRALDEVMNKLQRANTDDPAYDENKRQCQEDIKVMNDYVDKIIADRKARGEQSHDLLTQMLNGKDPETGEPLDDGNIRQQIITFLIAGHQTTSGLLSFALYFLVKNPRVLQKVAEEAARVLVDPVPSYKQVKQLKYVGMVLNEALRLWPVAPMFSLYAKEDTVLGGEYSLTKGDEVMVLVPQLHRDKTIWGDDVEEFRPERFENPSAIPQHAFKPFGNGQRACIGQQFALHSATLVLGMMLKHFDFEDHTNYELVIKESRTLKPEGFVVKAKSKGIPLGGIPSPSTEQSAKKVRKKAENAHNTPLLVLYGSNAGTAEGTARDLADIAMSKGFAPQVATLDSHAGNLPREGAVLIVTASYNGHPPDNAKQFVDWLDQASADEVKGVRYSVFGCGDKNWAGTYQKVPAFIDETLAAKGAENIAKRGEADASDDFEGAYEEWRDHMWSDVAAYFGLDIENSEDNKSTLSLQFVDSAADMPLAKMHGAFSTNVVASKELQQPGSARSTRHLEIELPKEASYQEGDHLGVIPRYYEGIVNRVTQRFGLSASQLIRLEAEEEKLAHLPLAKTVSVEELLQYVELQDPVTRTQLRAMAAKTVCPPHKVELEALLGKQAYKEQVLAKRLTMLELLEKYPACEMSFSEFIALLPSIRPRYYSISSSPRVDLKQASITVSVVSGLAWSGYGEYKGIASNYLAELQEGDTITCFISTPQSEFTLPKDPETPLIMVGPGTGVAPFRGFVQARKQLKEQGQSLGEAHLYFGCRSPHEDYLYQEELENAQSEGIILLHTAFSRMPNQPKTYVQHVMEQDGKKLIELLDQGAHFYICGDGIQMAPAVEATLMKSYADVHQVSEADARLWLQQLEEKGRYAKDVWLG

SEQ ID NO: 1187 - DNA, 3147 bp, synthetic construct
  misc_feature 1..3147: note = variant of P450 oxidase from Bacillus megaterium
  source 1..3147: mol_type = other DNA
atgacaattaaggaaatgcctcagcctaagacgtttggagaacttaaaaatttaccgttattaaatacagataaaccggttcaagctttgatgcgtattgcggatgaattaggagaaatctttaaattcgaggcgcctggtagcgtaacgcgctatttatcaagtcagcgtctaattaaagaagcatgcgatgaatcacgctttgataaaaacttaagtcaagggcttaaatttgcacgtgattttgttggagacgggctggttacaagctggacgcatgaaccgaattggaaaaaagcgcataatatcttagttccaagctttagtcagcatgcaatggggcgttatcatgcgatgatggtcgatatcgccgtgcagatggttcaaaagtgggagcgtctaaatgcagatgagcatattgaagtatcggaagacatgacacgtttaacgcttgatacaattggtctttgcctgtttaactatcgctttaacagcttttaccgagatacgcctcatccatttattgtgagtgtggttcgtgcactggatgaagtaatgaacaagctgcagcgagcaaatccagacgacccagcttatgatgaaaacaagcgccagtgtcaagaagataccaaggtgatgaacgactatgtagataaaattattgcagatcgcaaagcaaggggtgaacaaagtcatgatttattaacgcagatgctaaacggaaaagatccagaaacgggtgagccgcttgatgacgggaatattcgtcagcaaattattacattcttaattgcgggacaccaaacgacaagtggtcttttatcatttgcgctgtatttcttagtgaaaaatccacgtgtattacaaaaagtagcagaagaagcagcacgagttctagtagatcctgttccaagctacaaacaagtcaaacagcttaaatatgttggcatggtcttaaacgaagcgctgcgcttatggccagtagcgcctatgttttccctatatgcaaaagaagatacggtgcttggaggagaatatgaattaacgaaaggcgacgaagtaatggttctggtgcctcagcttcaccgtgataaaacaatttggggagacgatgtggaggagttccgtccagagcgttttgaaaatccaagtgcgattccgcagcatgcgtttaaaccgtttggaaacggtcagcgtgcgtgtatcggtcagcagttcgctcttcatagtgcaacgctggtacttggtatgatgctaaaacactttgactttgaagatcatacaaactacgagctcgttattaaagaatcgcggacgttaaaacctgaaggctttgtggtaaaagcaaaatcgaaaggcattccgcttggcggtattccttcacctagcactgaacagtctgctaaaaaagtacgcaaaaaggcagaaaacgctcataatacgccgctgcttgtgctatacggttcaaatgcgggaacagctgaaggaacggcgcgtgatttagcagatattgcaatgagcaaaggatttgcaccgcaggtcgcaacgcttgattcacacgccggtaatcttccgcgcgaaggagctgtattaattgtaacggcgtcttataacggtcatccgcctgataacgcaaagcaatttgtcgattggttagaccaagcgtctgcggatgaagtaaaaggcgttcgctactccgtatttggatgcggcgataaaaattgggcggggacgtatcaaaaagtgcctgcttttatcgatgaaacgcttgccgctaaaggggcagaaaacatcgctaagcgcggtgaagcagatgcaagcgacgactttgaaggcgcgtatgaagaatggcgtgatcatatgtggagtgacgtagcagcctactttggtctcgacattgaaaacagtgaagataataaatctactctttcacttcaatttgtcgacagcgcggcggatatgcctcttgcgaaaatgcacggtgcgttttcaacgaacgtcgtagcaagcaaagaacttcaacagcctggcagtgcacgaagcacgcgacatcttgaaattgaacttccaaaagaagcttcttatcaagaaggagatcatttaggtgttattcctcgctattatgaaggaatagtaaaccgtgtaacacagaggttcggcctaagcgcatcacagctgatccgtctggaagcagaagaagaaaaattagctcatttgccactcgctaaaacagtatccgtagaagagcttctgcaatacgtggagcttcaagatcctgttacgcgcacgcagcttcgcgcaatggctgctaaaacggtctgcccgccgcataaagtagagcttgaagccttgcttggcaagcaagcctacaaagaacaagtgctggcaaaacgtttaacaatgcttgaactgcttgaaaaatacccggcgtgtgaaatgagtttcagcgaatttatcgcccttctgccaagcatacgcccgcgctattactcgatttcttcatcacctcgtgtcgatctgaaacaagcaagcatcacggtcagcgttgtcagtggactggcgtggagcggatatggagaatataaaggaattgcgtcgaactatcttgctgagctgcaagaaggagatacgattacgtgctttatttccacaccgcagtcagagtttacgctgccaaaagaccctgaaacgccgcttatcatggtcggaccgggaacaggcgtcgcgccgtttagaggctttgtgcaggcgcgcaaacagctaaaagaacaaggacagtcacttggagaagcacatttatacttcggctgccgttcacctcatgaagactatctgtatcaagaagagcttgaaaacgcccaaagcgaaggcatcattctgcttcataccgctttttctcgcatgccgaatcagccgaaaacatacgttcagcacgtaatggaacaagacggcaagaaattgattgaacttcttgatcaaggagcgcacttctatatttgcggagacggaattcaaatggcacctgccgttgaagcaacgcttatgaaaagctatgctgacgttcaccaagtgagtgaagcagacgctcgcttatggctgcagcagctagaagaaaaaggccgatacgcaaaagacgtgtggctgggg

SEQ ID NO: 1188 - protein, 1049 aa, synthetic construct
  REGION 1..1049: note = variant of P450 oxidase from Bacillus megaterium
MTIKEMPQPKTFGELKNLPLLNTDKPVQALMRIADELGEIFKFEAPGSVTRYLSSQRLIKEACDESRFDKNLSQGLKFARDFVGDGLVTSWTHEPNWKKAHNILVPSFSQHAMGRYHAMMVDIAVQMVQKWERLNADEHIEVSEDMTRLTLDTIGLCLFNYRFNSFYRDTPHPFIVSVVRALDEVMNKLQRANPDDPAYDENKRQCQEDTKVMNDYVDKIIADRKARGEQSHDLLTQMLNGKDPETGEPLDDGNIRQQIITFLIAGHQTTSGLLSFALYFLVKNPRVLQKVAEEAARVLVDPVPSYKQVKQLKYVGMVLNEALRLWPVAPMFSLYAKEDTVLGGEYELTKGDEVMVLVPQLHRDKTIWGDDVEEFRPERFENPSAIPQHAFKPFGNGQRACIGQQFALHSATLVLGMMLKHFDFEDHTNYELVIKESRTLKPEGFVVKAKSKGIPLGGIPSPSTEQSAKKVRKKAENAHNTPLLVLYGSNAGTAEGTARDLADIAMSKGFAPQVATLDSHAGNLPREGAVLIVTASYNGHPPDNAKQFVDWLDQASADEVKGVRYSVFGCGDKNWAGTYQKVPAFIDETLAAKGAENIAKRGEADASDDFEGAYEEWRDHMWSDVAAYFGLDIENSEDNKSTLSLQFVDSAADMPLAKMHGAFSTNVVASKELQQPGSARSTRHLEIELPKEASYQEGDHLGVIPRYYEGIVNRVTQRFGLSASQLIRLEAEEEKLAHLPLAKTVSVEELLQYVELQDPVTRTQLRAMAAKTVCPPHKVELEALLGKQAYKEQVLAKRLTMLELLEKYPACEMSFSEFIALLPSIRPRYYSISSSPRVDLKQASITVSVVSGLAWSGYGEYKGIASNYLAELQEGDTITCFISTPQSEFTLPKDPETPLIMVGPGTGVAPFRGFVQARKQLKEQGQSLGEAHLYFGCRSPHEDYLYQEELENAQSEGIILLHTAFSRMPNQPKTYVQHVMEQDGKKLIELLDQGAHFYICGDGIQMAPAVEATLMKSYADVHQVSEADARLWLQQLEEKGRYAKDVWLG

SEQ ID NO: 1189 - DNA, 3147 bp, synthetic construct
  misc_feature 1..3147: note = variant of P450 oxidase from Bacillus megaterium
  source 1..3147: mol_type = other DNA
atgacaattaaggaaatgcctcagcctaagacgtttggagaacttaaaaatttaccgttattaaatacagataaaccggttcaagctttgatgcgtattgcggatgaattaggagaaatctttaaattcgaggcacctggtagcgtaacgcgctatttatcaagtcagcgtctaattaaagaagcatgcgatgaatcacgctttgataaaaacttaagtcaagggcttaaatttgcacgtgattttgttggagacgggctggttacaagctggacgcatgaaccgaattggaaaaaagcgcataatatcttagttccaagctttagtcagcatgcaatggggcgttatcatgcgatgatggtcgatatcgccgtgcagatggttcaaaagtgggagcgtctaaatgcagatgagcatattgaagtatcggaagacatgacacgtttaacgcttgatacaattggtctttgcctgtttaactatcgctttaacagcttttaccgagatacgcctcatccatttattgtgagtgtggttcgtgcactggatgaagtaatgaacaagctgcagcgagcaaatccagacgacccagcttatgatgaaaacaagcgccagtgtcaagaagatatcaaggtgatgaacgactatgtagataaaattattgcagatcgcaaagcaaggggtgaacaaagtcatgatttattaacccagatgctaaacggaaaagattatgaaacgggtgagccgcttgatgacgggaatattcgtcagcaaattattacattcttaattgcgggacaccaaacgacaagtggtcttttatcatttgcgctgtatttcttagtgaaaaatccacgtgtattacaaaaagtagcagaagaagcagcacgagttctagtagatcctgttccaagctacaaacaagtcaaacagcttaaatatgttggcatggtcttaaacgaagcgctgcgcttatggccagtagcgcctatgttttccctatatgcaaaagaagatacggtgcttggaggagaatatccgttaacgaaaggcgacgaagtaatggttctggtgcctcagcttcaccgtgataaaacaatttggggagacgatgtggaggagttccgtccagagcgttttgaaaatccaagtgcgattccgcagcatgcgtttaaaccgtttggaaacggtcagcgtgcgtgtatcggtcagcagttcgctcttcatagtgcaacgctggtacttggtatgatgctaaaacactttgactttgaagatcatacaaactacgagctcgttattaaagaatcgcggacgttaaaacctgaaggctttgtggtaaaagcaaaatcgaaaggcattccgcttggcggtattccttcacctagcactgaacagtctgctaaaaaagtacgcaaaaaggcagaaaacgctcataatacgccgctgcttgtgctatacggttcaaatgcgggaacagctgaaggaacggcgcgtgatttagcagatattgcaatgagcaaaggatttgcaccgcaggtcgcaacgcttgattcacacgccggtaatcttccgcgcgaaggagctgtattaattgtaacggcgtcttataacggtcatccgcctgataacgcaaagcaatttgtcgattggttagaccaagcgtctgcggatgaagtaaaaggcgttcgctactccgtatttggatgcggcgataaaaattgggcggggacgtatcaaaaagtgcctgcttttatcgatgaaacgcttgccgctaaaggggcagaaaacatcgctaagcgcggtgaagcagatgcaagcgacgactttgaaggcgcgtatgaagaatggcgtgatcatatgtggagtgacgtagcagcctactttggtctcgacattgaaaacagtgaagataataaatctactctttcacttcaatttgtcgacagcgcggcggatatgcctcttgcgaaaatgcacggtgcgttttcaacgaacgtcgtagcaagcaaagaacttcaacagcctggcagtgcacgaagcacgcgacatcttgaaattgaacttccaaaagaagcttcttatcaagaaggagatcatttaggtgttattcctcgctattatgaaggaatagtaaaccgtgtaacacagaggttcggcctaagcgcatcacagctgatccgtctggaagcagaagaagaaaaattagctcatttgccactcgctaaaacagtatccgtagaagagcttctgcaatacgtggagcttcaagatcctgttacgcgcacgcagcttcgcgcaatggctgctaaaacggtctgcccgccgcataaagtagagcttgaagccttgcttggcaagcaagcctacaaagaacaagtgctggcaaaacgtttaacaatgcttgaactgcttgaaaaatacccggcgtgtgaaatgagtttcagcgaatttatcgcccttctgccaagcatacgcccgcgctattactcgatttcttcatcacctcgtgtcgatctgaaacaagcaagcatcacggtcagcgttgtcagtggaccggcgtggagcggatatggagaatataaaggaattgcgtcgaactatcttgctgagctgcaagaaggagatacgattacgtgctttatttccacaccgcagtcagagtttacgctgccaaaagaccctgaaacgccgcttatcatggtcggaccgggaacaggcgtcgcgccgtttagaggctttgtgcaggcgcgcaaacagctaaaagaacaaggacagtcacttggagaagcacatttatacttcggctgccgttcacctcatgaagactatctgtatcaagaagagcttgaaaacgcccaaagcgaaggcatcattctgcttcataccgctttttctcgcatgccgaatcagccgaaaacatacgttcagcacgtaatggaacaagacggcaagaaattgattgaacttcttgatcaaggagcgcacttctatatttgcggagacggaattcaaatggcacctgccgttgaagcaacgcttatgaaaagctatgctgacgttcaccaagtgagtgaagcagacgctcgcttatggctgcagcagctagaagaaaaaggccgatacgcaaaagacgtgtggctgggg

SEQ ID NO: 1190 - protein, 1049 aa, synthetic construct
  REGION 1..1049: note = variant of P450 oxidase from Bacillus megaterium
MTIKEMPQPKTFGELKNLPLLNTDKPVQALMRIADELGEIFKFEAPGSVTRYLSSQRLIKEACDESRFDKNLSQGLKFARDFVGDGLVTSWTHEPNWKKAHNILVPSFSQHAMGRYHAMMVDIAVQMVQKWERLNADEHIEVSEDMTRLTLDTIGLCLFNYRFNSFYRDTPHPFIVSVVRALDEVMNKLQRANPDDPAYDENKRQCQEDIKVMNDYVDKIIADRKARGEQSHDLLTQMLNGKDYETGEPLDDGNIRQQIITFLIAGHQTTSGLLSFALYFLVKNPRVLQKVAEEAARVLVDPVPSYKQVKQLKYVGMVLNEALRLWPVAPMFSLYAKEDTVLGGEYPLTKGDEVMVLVPQLHRDKTIWGDDVEEFRPERFENPSAIPQHAFKPFGNGQRACIGQQFALHSATLVLGMMLKHFDFEDHTNYELVIKESRTLKPEGFVVKAKSKGIPLGGIPSPSTEQSAKKVRKKAENAHNTPLLVLYGSNAGTAEGTARDLADIAMSKGFAPQVATLDSHAGNLPREGAVLIVTASYNGHPPDNAKQFVDWLDQASADEVKGVRYSVFGCGDKNWAGTYQKVPAFIDETLAAKGAENIAKRGEADASDDFEGAYEEWRDHMWSDVAAYFGLDIENSEDNKSTLSLQFVDSAADMPLAKMHGAFSTNVVASKELQQPGSARSTRHLEIELPKEASYQEGDHLGVIPRYYEGIVNRVTQRFGLSASQLIRLEAEEEKLAHLPLAKTVSVEELLQYVELQDPVTRTQLRAMAAKTVCPPHKVELEALLGKQAYKEQVLAKRLTMLELLEKYPACEMSFSEFIALLPSIRPRYYSISSSPRVDLKQASITVSVVSGPAWSGYGEYKGIASNYLAELQEGDTITCFISTPQSEFTLPKDPETPLIMVGPGTGVAPFRGFVQARKQLKEQGQSLGEAHLYFGCRSPHEDYLYQEELENAQSEGIILLHTAFSRMPNQPKTYVQHVMEQDGKKLIELLDQGAHFYICGDGIQMAPAVEATLMKSYADVHQVSEADARLWLQQLEEKGRYAKDVWLG

SEQ ID NO: 1191 - DNA, 3147 bp, synthetic construct
  misc_feature 1..3147: note = variant of P450 oxidase from Bacillus megaterium
  source 1..3147: mol_type = other DNA
atgacaattaaggaaatgcctcagcctaagacgtttggagaacttaaaaatttaccgttattaaatacagataaaccggttcaagctttgatgcgtattgcggatgaattaggagaaatctttaaattcgaggcgcctggtagcgtaacgcgctatttatcaagtcagcgtctaattaaagaagcatgcgatgaatcacgctttgataaaaacttaagtcaagggcttaaatttgcacgtgattttgttggagacgggctggttacaagctggacgcatgaaccgaattggaaaaaagcgcataatatcttagttccaagctttagtcagctggcaatggggcgttatcatgcgatgatggtcgatatcgccgtgcagcttgttcaaaagtgggagcgtctaaatgcagatgagcatattgaagtatcggaagacatgacacgtttaacgcttgatacaattggtctttgcctgtttaactatcgctttaacagcttttaccgagatacgcctcatccatttattgtgagtgtggttcgtgcactggatgaagtaatgaacaagctgcagcgagcaaatccagacgacccagcttatgatgaaaacaagcgccagtgtcaagaagatatcaaggtgatgaacgactatgtagataaaattattgcagatcgcaaagcaaggggtgaacaaagtcatgatttattaacccagatgctaaacggaaaagattatgaaacgggtgagccgcttgatgacgggaatattcgtcagcaaattattacattcttaattgcgggacaccaaacgacaagtggtcttttatcatttgcgctgtatttcttagtgaaaaatccacgtgtattacaaaaagtagcagaagaagcagcacgagttctagtagatcctgttccaagctacaaacaagtcaaacagcttaaatatgttggcatggtcttaaacgaagcgctgcgcttatggccagtagcgcctatgttttccctatatgcaaaagaagatacggtgcttggaggagaatatcctttaacgaaaggcgacgaagtaatggttctggtgcctcagcttcaccgtgataaaacaatttggggagacgatgtggaggagttccgtccagagcgttttgaaaatccaagtgcgattccgcagcatgcgtttaaaccgtttggaaacggtcagcgtgcgtgtatcggtcagcagttcgctcttcatagtgcaacgctggtacttggtatgatgctaaaacactttgactttgaagatcatacaaactacgagctcgttattaaagaatcgcggacgttaaaacctgaaggctttgtggtaaaagcaaaatcgaaaggcattccgcttggcggtattccttcacctagcactgaacagtctgctaaaaaagtacgcaaaaaggcagaaaacgctcataatacgccgctgcttgtgctatacggttcaaatgcgggaacagctgaaggaacggcgcgtgatttagcagatattgcaatgagcaaaggatttgcaccgcaggtcgcaacgcttgattcacacgccggtaatcttccgcgcgaaggagctgtattaattgtaacggcgtcttataacggtcatccgcctgataacgcaaagcaatttgtcgattggttagaccaagcgtctgcggatgaagtaaaaggcgttcgctactccgtatttggatgcggcgataaaaattgggcggggacgtatcaaaaagtgcctgcttttatcgatgaaacgcttgccgctaaaggggcagaaaacatcgctaagcgcggtgaagcagatgcaagcgacgactttgaaggcgcgtatgaagaatggcgtgatcatatgtggagtgacgtagcagcctactttggtctcgacattgaaaacagtgaagataataaatctactctttcacttcaatttgtcgacagcgcggcggatatgcctcttgcgaaaatgcacggtgcgttttcaacgaacgtcgtagcaagcaaagaacttcaacagcctggcagtgcacgaagcacgcgacatcttgaaattgaacttccaaaagaagcttcttatcaagaaggagatcatttaggtgttattcctcgctattatgaaggaatagtaaaccgtgtaacacagaggttcggcctaagcgcatcacagctgatccgtctggaagcagaagaagaaaaattagctcatttgccactcgctaaaacagtatccgtagaagagcttctgcaatacgtggagcttcaagatcctgttacgcgcacgcagcttcgcgcaatggctgctaaaacggtctgcccgccgcataaagtagagcttgaagccttgcttggcaagcaagcctacaaagaacaagtgctggcaaaacgtttaacaatgcttgaactgcttgaaaaatacccggcgtgtgaaatgagtttcagcgaatttatcgcccttctgccaagcatacgcccgcgctattactcgatttcttcatcacctcgtgtcgatctgaaacaagcaagcatcacggtcagcgttgtcagcggactggcgtggagcggatatggagaatataaaggaattgcgtcgaactatcttgctgagctgcaagaaggagatacgattacgtgctttatttccacaccgcagtcagagtttacgctgccaaaagaccctgaaacgccgcttatcatggtcggaccgggaacaggcgtcgcgccgtttagaggctttgtgcaggcgcgcaaacagctaaaagaacaaggacagtcacttggagaagcacatttatacttcggctgccgttcacctcatgaagactatctgtatcaagaagagcttgaaaacgcccaaagcgaaggcatcattctgcttcataccgctttttctcgcatgccgaatcagccgaaaacatacgttcagcacgtaatggaacaagacggcaagaaattgattgaacttcttgatcaaggagcgcacttctatatttgcggagacggaattcaaatggcacctgccgttgaagcaacgcttatgaaaagctatgctgacgttcaccaagtgagtgaagcagacgctcgcttatggctgcagcagctagaagaaaaaggccgatacgcaaaagacgtgtggctgggg

SEQ ID NO: 1192 - protein, 1049 aa, synthetic construct
  REGION 1..1049: note = variant of P450 oxidase from Bacillus megaterium
MTIKEMPQPKTFGELKNLPLLNTDKPVQALMRIADELGEIFKFEAPGSVTRYLSSQRLIKEACDESRFDKNLSQGLKFARDFVGDGLVTSWTHEPNWKKAHNILVPSFSQLAMGRYHAMMVDIAVQLVQKWERLNADEHIEVSEDMTRLTLDTIGLCLFNYRFNSFYRDTPHPFIVSVVRALDEVMNKLQRANPDDPAYDENKRQCQEDIKVMNDYVDKIIADRKARGEQSHDLLTQMLNGKDYETGEPLDDGNIRQQIITFLIAGHQTTSGLLSFALYFLVKNPRVLQKVAEEAARVLVDPVPSYKQVKQLKYVGMVLNEALRLWPVAPMFSLYAKEDTVLGGEYPLTKGDEVMVLVPQLHRDKTIWGDDVEEFRPERFENPSAIPQHAFKPFGNGQRACIGQQFALHSATLVLGMMLKHFDFEDHTNYELVIKESRTLKPEGFVVKAKSKGIPLGGIPSPSTEQSAKKVRKKAENAHNTPLLVLYGSNAGTAEGTARDLADIAMSKGFAPQVATLDSHAGNLPREGAVLIVTASYNGHPPDNAKQFVDWLDQASADEVKGVRYSVFGCGDKNWAGTYQKVPAFIDETLAAKGAENIAKRGEADASDDFEGAYEEWRDHMWSDVAAYFGLDIENSEDNKSTLSLQFVDSAADMPLAKMHGAFSTNVVASKELQQPGSARSTRHLEIELPKEASYQEGDHLGVIPRYYEGIVNRVTQRFGLSASQLIRLEAEEEKLAHLPLAKTVSVEELLQYVELQDPVTRTQLRAMAAKTVCPPHKVELEALLGKQAYKEQVLAKRLTMLELLEKYPACEMSFSEFIALLPSIRPRYYSISSSPRVDLKQASITVSVVSGLAWSGYGEYKGIASNYLAELQEGDTITCFISTPQSEFTLPKDPETPLIMVGPGTGVAPFRGFVQARKQLKEQGQSLGEAHLYFGCRSPHEDYLYQEELENAQSEGIILLHTAFSRMPNQPKTYVQHVMEQDGKKLIELLDQGAHFYICGDGIQMAPAVEATLMKSYADVHQVSEADARLWLQQLEEKGRYAKDVWLG

SEQ ID NO: 1193 - DNA, 3147 bp, synthetic construct
  misc_feature 1..3147: note = variant of P450 oxidase from Bacillus megaterium
  source 1..3147: mol_type = other DNA
atgacaattaaggaaatgcctcagcctaagacgtttggagaacttaaaaatttaccgttattaaatacagataaaccggttcaagctttgatgcgtattgcggatgaattaggagaaatctttaaattcgaggaacctggtagcgtaacgcgctatttatcaagtcagcgtctaattaaagaagcatgcgatgaatcacgctttgataaaaacttaagtcaagggcttaaatttgcacgtgattttgttggagacgggctggttacaagctggacgcatgaaccgaattggaaaaaagcgcataatatcttagttccaagctttagtcagcgcgcaatggggcgttatcatgcgatgatggtcgatatcgccgtgcagcttgttcaaaagtgggagcgtctaaatgcagatgagcatattgaagtatcggaagacatgacacgtttaacgcttgatacaattggtctttgcctgtttaactatcgctttaacagcttttaccgagatacgcctcatccatttattgtgagtgtggttcgtgcactggatgaagtaatgaacaagctgcagcgagcaaatccagacgacccagcttatgatgaaaacaagcgccagtgtcaagaagatatcaaggtgatgaacgactatgtagataaaattattgcagatcgcaaaaacaggggtgaacaaagtcatgatttattaacgcagatgctaaacggaaaagatccagaaacgggtgagccgcttgatgacgggaatattcgtcagcaaattattacattcttaattgcgggacaccaaacgacaagtggtcttttatcatttgcgctgtatttcttagtgaaaaatccacgtgtattacaaaaagtagcagaagaagcagcacgagttctagtagatcctgttccaagctacaaacaagtcaaacagcttaaatatgttggcatggtcttaaacgaagcgctgcgcttatggccagtagcgcctatgttttccctatatgcaaaagaagatacggtgcttggaggagaatattcgttaacgaaaggcgacgaagtaatggttctggtgcctcagcttcaccgtgataaaacaatttggggagacgatgtggaggagttccgtccagagcgttttgaaaatccaagtgcgattccgcagcatgcgtttaaaccgtttggaaacggtcagcgtgcgtgtatcggtcagcagttcgctcttcatagtgcaacgctggtacttggtatgatgctaaaacactttgactttgaagatcatacaaactacgagctcgttattaaagaatcgcggacgttaaaacctgaaggctttgtggtaaaagcaaaatcgaaaggcattccgcttggcggtattccttcacctagcactgaacagtctgctaaaaaagtacgcaaaaaggcagaaaacgctcataatacgccgctgcttgtgctatacggttcaaatgcgggaacagctgaaggaacggcgcgtgatttagcagatattgcaatgagcaaaggatttgcaccgcaggtcgcaacgcttgattcacacgccggtaatcttccgcgcgaaggagctgtattaattgtaacggcgtcttataacggtcatccgcctgataacgcaaagcaatttgtcgattggttagaccaagcgtctgcggatgaagtaaaaggcgttcgctactccgtatttggatgcggcgataaaaattgggcggggacgtatcaaaaagtgcctgcttttatcgatgaaacgcttgccgctaaaggggcagaaaacatcgctaagcgcggtgaagcagatgcaagcgacgactttgaaggcgcgtatgaagaatggcgtgatcatatgtggagtgacgtagcagcctactttggtctcgacattgaaaacagtgaagataataaatctactctttcacttcaatttgtcgacagcgcggcggatatgcctcttgcgaaaatgcacggtgcgttttcaacgaacgtcgtagcaagcaaagaacttcaacagcctggcagtgcacgaagcacgcgacatcttgaaattgaacttccaaaagaagcttcttatcaagaaggagatcatttaggtgttattcctcgctattatgaaggaatagtaaaccgtgtaacacagaggttcggcctaagcgcatcacagctgatccgtctggaagcagaagaagaaaaattagctcatttgccactcgctaaaacagtatccgtagaagagcttctgcaatacgtggagcttcaagatcctgttacgcgcacgcagcttcgcgcaatggctgctaaaacggtctgcccgccgcataaagtagagcttgaagccttgcttggcaagcaagcctacaaagaacaagtgctggcaaaacgtttaacaatgcttgaactgcttgaaaaatacccggcgtgtgaaatgagtttcagcgaatttatcgcccttctgccaagcatacgcccgcgctattactcgatttcttcatcacctcgtgtcgatctgaaacaagcaagcatcacggtcagcgttgtcagtggaccggcgtggagcggatatggagaatataaaggaattgcgtcgaactatcttgctgagctgcaagaaggagatacgattacgtgctttatttccacaccgcagtcagagtttacgctgccaaaagaccctgaaacgccgcttatcatggtcggaccgggaacaggcgtcgcgccgtttagaggctttgtgcaggcgcgcaaacagctaaaagaacaaggacagtcacttggagaagcacatttatacttcggctgccgttcacctcatgaagactatctgtatcaagaagagcttgaaaacgcccaaagcgaaggcatcattctgcttcataccgctttttctcgcatgccgaatcagccgaaaacatacgttcagcacgtaatggaacaagacggcaagaaattgattgaacttcttgatcaaggagcgcacttctatatttgcggagacggaattcaaatggcacctgccgttgaagcaacgcttatgaaaagctatgctgacgttcaccaagtgagtgaagcagacgctcgcttatggctgcagcagctagaagaaaaaggccgatacgcaaaagacgtgtggctgggg

SEQ ID NO: 1194 - protein, 1049 aa, synthetic construct
  REGION 1..1049: note = variant of P450 oxidase from Bacillus megaterium
MTIKEMPQPKTFGELKNLPLLNTDKPVQALMRIADELGEIFKFEEPGSVTRYLSSQRLIKEACDESRFDKNLSQGLKFARDFVGDGLVTSWTHEPNWKKAHNILVPSFSQRAMGRYHAMMVDIAVQLVQKWERLNADEHIEVSEDMTRLTLDTIGLCLFNYRFNSFYRDTPHPFIVSVVRALDEVMNKLQRANPDDPAYDENKRQCQEDIKVMNDYVDKIIADRKNRGEQSHDLLTQMLNGKDPETGEPLDDGNIRQQIITFLIAGHQTTSGLLSFALYFLVKNPRVLQKVAEEAARVLVDPVPSYKQVKQLKYVGMVLNEALRLWPVAPMFSLYAKEDTVLGGEYSLTKGDEVMVLVPQLHRDKTIWGDDVEEFRPERFENPSAIPQHAFKPFGNGQRACIGQQFALHSATLVLGMMLKHFDFEDHTNYELVIKESRTLKPEGFVVKAKSKGIPLGGIPSPSTEQSAKKVRKKAENAHNTPLLVLYGSNAGTAEGTARDLADIAMSKGFAPQVATLDSHAGNLPREGAVLIVTASYNGHPPDNAKQFVDWLDQASADEVKGVRYSVFGCGDKNWAGTYQKVPAFIDETLAAKGAENIAKRGEADASDDFEGAYEEWRDHMWSDVAAYFGLDIENSEDNKSTLSLQFVDSAADMPLAKMHGAFSTNVVASKELQQPGSARSTRHLEIELPKEASYQEGDHLGVIPRYYEGIVNRVTQRFGLSASQLIRLEAEEEKLAHLPLAKTVSVEELLQYVELQDPVTRTQLRAMAAKTVCPPHKVELEALLGKQAYKEQVLAKRLTMLELLEKYPACEMSFSEFIALLPSIRPRYYSISSSPRVDLKQASITVSVVSGPAWSGYGEYKGIASNYLAELQEGDTITCFISTPQSEFTLPKDPETPLIMVGPGTGVAPFRGFVQARKQLKEQGQSLGEAHLYFGCRSPHEDYLYQEELENAQSEGIILLHTAFSRMPNQPKTYVQHVMEQDGKKLIELLDQGAHFYICGDGIQMAPAVEATLMKSYADVHQVSEADARLWLQQLEEKGRYAKDVWLG

SEQ ID NO: 1195 - DNA, 3147 bp, synthetic construct
  misc_feature 1..3147: note = variant of P450 oxidase from Bacillus megaterium
  source 1..3147: mol_type = other DNA
atgacaattaaggaaatgcctcagcctaagacgtttggagaacttaaaaatttaccgttattaaatacagataaaccggttcaagctttgatgcgtattgcggatgaattaggagaaatctttaaattcgaggcgcctggtagcgtaacgcgctatttatcaagtcagcgtctaattaaagaagcatgcgatgaatcacgctttgataaaaacttaagtcaagggcttaaatttgcacgtgattttgttggagacgggctggttacaagctggacgcatgaaccgaattggaaaaaagcgcataatatcttagttccaagctttagtcagcatgcaatggggcgttatcatgcgatgatggtcgatatcgccgtgcagcttgttcaaaagtgggagcgtctaaatgcagatgagcatattgaagtatcggaagacatgacacgtttaacgcttgatacaattggtctttgcctgtttaactatcgctttaacagcttttaccgagatacgcctcatccatttattgtgagtgtggttcgtgcactggatgaagtaatgaacaagctgcagcgagcaaatccagacgacccagcttatgatgaaaacaagcgccagtgtcaagaagatatcaaggtgatgaacgactatgtagataaaattattgcagatcgcaaagcaaggggtgaacaaagtcatgatttattaacgcagatgctaaacggaaaagatccagaaacgggtgagccgcttgatgacgggaacattcgtcagcaaattattacattcttaattgcgggacaccaaacgacaagtggtcttttatcatttgcgctgtatttcttagtgaaaaatccacgtgtattacaaaaagtagcagaagaagcagcacgagttctagtagatcctgttccaagctacaaacaagtcaaacagcttaaatatgttggcatggtcttaaacgaagcgctgcgcttatggccagtagcgcctatgttttccctatatgcaaaagaagatacggtgcttggaggagaatatcctttaacgaaaggcgacgaagtaatggttctggtgcctcagcttcaccgtgataaaacaatttggggagacgatgtggaggagttccgtccagagcgttttgaaaatccaagtgcgattccgcagcatgcgtttaaaccgtttggaaacggtcagcgtgcgtgtatcggtcagcagttcgctcttcatagtgcaacgctggtacttggtatgatgctaaaacactttgactttgaagatcatacaaactacgagctcgttattaaagaatcgcggacgttaaaacctgaaggctttgtggtaaaagcaaaatcgaaaggcattccgcttggcggtattccttcacctagcactgaacagtctgctaaaaaagtacgcaaaaaggcagaaaacgctcataatacgccgctgcttgtgctatacggttcaaatgcgggaacagctgaaggaacggcgcgtgatttagcagatattgcaatgagcaaaggatttgcaccgcaggtcgcaacgcttgattcacacgccggtaatcttccgcgcgaaggagctgtattaattgtaacggcgtcttataacggtcatccgcctgataacgcaaagcaatttgtcgattggttagaccaagcgtctgcggatgaagtaaaaggcgttcgctactccgtatttggatgcggcgataaaaattgggcggggacgtatcaaaaagtgcctgcttttatcgatgaaacgcttgccgctaaaggggcagaaaacatcgctaagcgcggtgaagcagatgcaagcgacgactttgaaggcgcgtatgaagaatggcgtgatcatatgtggagtgacgtagcagcctactttggtctcgacattgaaaacagtgaagataataaatctactctttcacttcaatttgtcgacagcgcggcgacgatgcctcttgcgaaaatgcacggtgcgttttcaacgaacgtcgtagcaagcaaagaacttcaacagcctggcagtgcacgaagcacgcgacatcttgaaattgaacttccaaaagaagcttcttatcaagaaggagatcatttaggtgttattcctcgctattatgaaggaatagtaaaccgtgtaacacagaggttcggcctaagcgcatcacagctgatccgtctggaagcagaagaagaaaaattagctcatttgccactcgctaaaacagtatccgtagaagagcttctgcaatacgtggagcttcaagatcctgttacgcgcacgcagcttcgcgcaatggctgctaaaacggtctgcccgccgcataaagtagagcttgaagccttgcttggcaagcaagcctacaaagaacaagtgctggcaaaacgtttaacaatgcttgaactgcttgaaaaatacccggcgtgtgaaatgagtttcagcgaatttatcgcccttctgccaagcatacgcccgcgctattactcgatttcttcatcacctcgtgtcgatctgaaacaagcaagcatcacggtcagcgttgtcagcggaccggcgtggagcggatatggagaatataaaggaattgcgtcgaactatcttgctgagctgcaagaaggagatacgattacgtgctttatttccacaccgcagtcagagtttacgctgccaaaagaccctgaaacgccgcttatcatggtcggaccgggaacaggcgtcgcgccgtttagaggctttgtgcaggcgcgcaaacagctaaaagaacaaggacagtcacttggagaagcacatttatacttcggctgccgttcacctcatgaagactatctgtatcaagaagagcttgaaaacgcccaaagcgaaggcatcattctgcttcataccgctttttctcgcatgccgaatcagccgaaaacatacgttcagcacgtaatggaacaagacggcaagaaattgattgaacttcttgatcaaggagcgcacttctatatttgcggagacggaattcaaatggcacctgccgttgaagcaacgcttatgaaaagctatgctgacgttcaccaagtgagtgaagcagacgctcgcttatggctgcagcagctagaagaaaaaggccgatacgcaaaagacgtgtggctgggg

SEQ ID NO: 1196 - protein, 1049 aa, synthetic construct
  REGION 1..1049: note = variant of P450 oxidase from Bacillus megaterium
MTIKEMPQPKTFGELKNLPLLNTDKPVQALMRIADELGEIFKFEAPGSVTRYLSSQRLIKEACDESRFDKNLSQGLKFARDFVGDGLVTSWTHEPNWKKAHNILVPSFSQHAMGRYHAMMVDIAVQLVQKWERLNADEHIEVSEDMTRLTLDTIGLCLFNYRFNSFYRDTPHPFIVSVVRALDEVMNKLQRANPDDPAYDENKRQCQEDIKVMNDYVDKIIADRKARGEQSHDLLTQMLNGKDPETGEPLDDGNIRQQIITFLIAGHQTTSGLLSFALYFLVKNPRVLQKVAEEAARVLVDPVPSYKQVKQLKYVGMVLNEALRLWPVAPMFSLYAKEDTVLGGEYPLTKGDEVMVLVPQLHRDKTIWGDDVEEFRPERFENPSAIPQHAFKPFGNGQRACIGQQFALHSATLVLGMMLKHFDFEDHTNYELVIKESRTLKPEGFVVKAKSKGIPLGGIPSPSTEQSAKKVRKKAENAHNTPLLVLYGSNAGTAEGTARDLADIAMSKGFAPQVATLDSHAGNLPREGAVLIVTASYNGHPPDNAKQFVDWLDQASADEVKGVRYSVFGCGDKNWAGTYQKVPAFIDETLAAKGAENIAKRGEADASDDFEGAYEEWRDHMWSDVAAYFGLDIENSEDNKSTLSLQFVDSAATMPLAKMHGAFSTNVVASKELQQPGSARSTRHLEIELPKEASYQEGDHLGVIPRYYEGIVNRVTQRFGLSASQLIRLEAEEEKLAHLPLAKTVSVEELLQYVELQDPVTRTQLRAMAAKTVCPPHKVELEALLGKQAYKEQVLAKRLTMLELLEKYPACEMSFSEFIALLPSIRPRYYSISSSPRVDLKQASITVSVVSGPAWSGYGEYKGIASNYLAELQEGDTITCFISTPQSEFTLPKDPETPLIMVGPGTGVAPFRGFVQARKQLKEQGQSLGEAHLYFGCRSPHEDYLYQEELENAQSEGIILLHTAFSRMPNQPKTYVQHVMEQDGKKLIELLDQGAHFYICGDGIQMAPAVEATLMKSYADVHQVSEADARLWLQQLEEKGRYAKDVWLG

SEQ ID NO: 1197 - DNA, 3147 bp, synthetic construct
  misc_feature 1..3147: note = variant of P450 oxidase from Bacillus megaterium
  source 1..3147: mol_type = other DNA
atgacaattaaggaaatgcctcagcctaagacgtttggagaacttaaaaatttaccgttattaaatacagataaaccggttcaagctttgatgcgtattgcggatgaattaggagaaatctttaaattcgaggcgcctggtagcgtaacgcgctatttatcaagtcagcgtctaattaaagaagcatgcgatgaatcacgctttgataaaaacttaagtcaagggcttaaatttgcacgtgattttgttggagacgggctggttacaagctggacgcatgaaccgaattggaaaaaagcgcataatatcttagttccaagctttagtcagcatgcaatggggcgttatcatgcgatgatggtcgatatcgccgtgcagcttgttcaaaagtgggagcgtctaaatgcagatgagcatattgaagtatcggaagacatgacacgtttaacgcttgatacaattggtctttgcctgtttaactatcgctttaacagcttttaccgagatacgcctcatccatttattgtgagtgtggttcgtgcactggatgaagtaatgaacaagctgcagcgagcaaatccagacgacccagcttatgatgaaaacaagcgccagtgtcaagaagatatcaaggtgatgaacgactatgtagataaaattattgcagatcgcaaagcaaggggtgaacaaagtcatgatttattaacgcagatgctaaacggaaaagatccagaaacgggtgagccgcttgatgacgggaacattcgtcagcaaattattacattcttaattgcgggacaccaaacgacaagtggtcttttatcatttgcgctgtatttcttagtgaaaaatccacgtgtattacaaaaagtagcagaagaagcagcacgagttctagtagatcctgttccaagctacaaacaagtcaaacagcttaaatatgttggcatggtcttaaacgaagcgctgcgcttatggccagtagcgcctatgttttccctatatgcaaaagaagatacggtgcttggaggagaatatcctttaacgaaaggcgacgaagtaatggttctggtgcctcagcttcaccgtgataaaacaatttggggagacgatgtggaggagttccgtccagagcgttttgaaaatccaagtgcgattccgcagcatgcgtttaaaccgtttggaaacggtcagcgtgcgtgtatcggtcagcagttcgctcttcatagtgcaacgctggtacttggtatgatgctaaaacactttgactttgaagatcatacaaactacgagctcgttattaaagaatcgcggacgttaaaacctgaaggctttgtggtaaaagcaaaatcgaaaggcattccgcttggcggtattccttcacctagcactgaacagtctgctaaaaaagtacgcaaaaaggcagaaaacgctcataatacgccgctgcttgtgctatacggttcaaatgcgggaacagctgaaggaacggcgcgtgatttagcagatattgcaatgagcaaaggatttgcaccgcaggtcgcaacgcttgattcacacgccggtaatcttccgcgcgaaggagctgtattaattgtaacggcgtcttataacggtcatccgcctgataacgcaaagcaatttgtcgattggttagaccaagcgtctgcggatgaagtaaaaggcgttcgctactccgtatttggatgcggcgataaaaattgggcggggacgtatcaaaaagtgcctgcttttatcgatgaaacgcttgccgctaaaggggcagaaaacatcgctaagcgcggtgaagcagatgcaagcgacgactttgaaggcgcgtatgaagaatggcgtgatcatacttggagtgacgtagcagcctactttggtctcgacattgaaaacagtgaagataataaatctactctttcacttcaatttgtcgacagcgcggcggatatgcctcttgcgaaaatgcacggtgcgttttcaacgaacgtcgtagcaagcaaagaacttcaacagcctggcagtgcacgaagcacgcgacatcttgaaattgaacttccaaaagaagcttcttatcaagaaggagatcatttaggtgttattcctcgctattatgaaggaatagtaaaccgtgtaacacagaggttcggcctaagcgcatcacagctgatccgtctggaagcagaagaagaaaaattagctcatttgccactcgctaaaacagtatccgtagaagagcttctgcaatacgtggagcttcaagatcctgttacgcgcacgcagcttcgcgcaatggctgctaaaacggtctgcccgccgcataaagtagagcttgaagccttgcttggcaagcaagcctacaaagaacaagtgctggcaaaacgtttaacaatgcttgaactgcttgaaaaatacccggcgtgtgaaatgagtttcagcgaatttatcgcccttctgccaagcatacgcccgcgctattactcgatttcttcatcacctcgtgtcgatctgaaacaagcaagcatcacggtcagcgttgtcagcggaccggcgtggagcggatatggagaatataaaggaattgcgtcgaactatcttgctgagctgcaagaaggagatacgattacgtgctttatttccacaccgcagtcagagtttacgctgccaaaagaccctgaaacgccgcttatcatggtcggaccgggaacaggcgtcgcgccgtttagaggctttgtgcaggcgcgcaaacagctaaaagaacaaggacagtcacttggagaagcacatttatacttcggctgccgttcacctcatgaagactatctgtatcaagaagagcttgaaaacgcccaaagcgaaggcatcattctgcttcataccgctttttctcgcatgccgaatcagccgaaaacatacgttcagcacgtaatggaacaagacggcaagaaattgattgaacttcttgatcaaggagcgcacttctatatttgcggagacggaattcaaatggcacctgccgttgaagcaacgcttatgaaaagctatgctgacgttcaccaagtgagtgaagcagacgctcgcttatggctgcagcagctagaagaaaaaggccgatacgcaaaagacgtgtggctgggg

SEQ ID NO: 1198 - protein, 1049 aa, synthetic construct
  REGION 1..1049: note = variant of P450 oxidase from Bacillus megaterium
MTIKEMPQPKTFGELKNLPLLNTDKPVQALMRIADELGEIFKFEAPGSVTRYLSSQRLIKEACDESRFDKNLSQGLKFARDFVGDGLVTSWTHEPNWKKAHNILVPSFSQHAMGRYHAMMVDIAVQLVQKWERLNADEHIEVSEDMTRLTLDTIGLCLFNYRFNSFYRDTPHPFIVSVVRALDEVMNKLQRANPDDPAYDENKRQCQEDIKVMNDYVDKIIADRKARGEQSHDLLTQMLNGKDPETGEPLDDGNIRQQIITFLIAGHQTTSGLLSFALYFLVKNPRVLQKVAEEAARVLVDPVPSYKQVKQLKYVGMVLNEALRLWPVAPMFSLYAKEDTVLGGEYPLTKGDEVMVLVPQLHRDKTIWGDDVEEFRPERFENPSAIPQHAFKPFGNGQRACIGQQFALHSATLVLGMMLKHFDFEDHTNYELVIKESRTLKPEGFVVKAKSKGIPLGGIPSPSTEQSAKKVRKKAENAHNTPLLVLYGSNAGTAEGTARDLADIAMSKGFAPQVATLDSHAGNLPREGAVLIVTASYNGHPPDNAKQFVDWLDQASADEVKGVRYSVFGCGDKNWAGTYQKVPAFIDETLAAKGAENIAKRGEADASDDFEGAYEEWRDHTWSDVAAYFGLDIENSEDNKSTLSLQFVDSAADMPLAKMHGAFSTNVVASKELQQPGSARSTRHLEIELPKEASYQEGDHLGVIPRYYEGIVNRVTQRFGLSASQLIRLEAEEEKLAHLPLAKTVSVEELLQYVELQDPVTRTQLRAMAAKTVCPPHKVELEALLGKQAYKEQVLAKRLTMLELLEKYPACEMSFSEFIALLPSIRPRYYSISSSPRVDLKQASITVSVVSGPAWSGYGEYKGIASNYLAELQEGDTITCFISTPQSEFTLPKDPETPLIMVGPGTGVAPFRGFVQARKQLKEQGQSLGEAHLYFGCRSPHEDYLYQEELENAQSEGIILLHTAFSRMPNQPKTYVQHVMEQDGKKLIELLDQGAHFYICGDGIQMAPAVEATLMKSYADVHQVSEADARLWLQQLEEKGRYAKDVWLG

SEQ ID NO: 1199 - DNA, 3147 bp, synthetic construct
  misc_feature 1..3147: note = variant of P450 oxidase from Bacillus megaterium
  source 1..3147: mol_type = other DNA
atgacaattaaggaaatgcctcagcctaagacgtttggagaacttaaaaatttaccgttattaaatacagataaaccggttcaagctttgatgcgtattgcggatgaattaggagaaatctttaaattcgaggcgcctggtagcgtaacgcgctatttatcaagtcagcgtctaattaaagaagcatgcgatgaatcacgctttgataaaaacttaagtcaagggcttaaatttgcacgtgattttgttggagacgggctggttacaagctggacgcatgaaccgaattggaaaaaagcgcataatatcttagttccaagctttagtcagcatgcaatggggcgttatcatgcgatgatggtcgatatcgccgtgcagcttgttcaaaagtgggagcgtctaaatgcagatgagcatattgaagtatcggaagacatgacacgtttaacgcttgatacaattggtctttgcctgtttaactatcgctttaacagcttttaccgagatacgcctcatccatttattgtgagtgtggttcgtgcactggatgaagtaatgaacaagctgcagcgagcaaatccagacgacccagcttatgatgaaaacaagcgccagtgtcaagaagatatcaaggtgatgaacgactatgtagataaaattattgcagatcgcaaagcaaggggtgaacaaagtcatgatttattaacgcagatgctaaacggaaaagatccagaaacgggtgagccgcttgatgacgggaacattcgtcagcaaattattacattcttaattgcgggacaccaaacgacaagtggtcttttatcatttgcgctgtatttcttagtgaaaaatccacgtgtattacaaaaagtagcagaagaagcagcacgagttctagtagatcctgttccaagctacaaacaagtcaaacagcttaaatatgttggcatggtcttaaacgaagcgctgcgcttatggccagtagcgcctatgttttccctatatgcaaaagaagatacggtgcttggaggagaatatcctttaacgaaaggcgacgaagtaatggttctggtgcctcagcttcaccgtgataaaacaatttggggagacgatgtggaggagttccgtccagagcgttttgaaaatccaagtgcgattccgcagcatgcgtttaaaccgtttggaaacggtcagcgtgcgtgtatcggtcagcagttcgctcttcatagtgcaacgctggtacttggtatgatgctaaaacactttgactttgaagatcatacaaactacgagctcgttattaaagaatcgcggacgttaaaacctgaaggctttgtggtaaaagcaaaatcgaaaggcattccgcttggcggtattccttcacctagcactgaacagtctgctaaaaaagtacgcaaaaaggcagaaaacgctcataatacgccgctgcttgtgctatacggttcaaatgcgggaacagctgaaggaacggcgcgtgatttagcagatattgcaatgagcaaaggatttgcaccgcaggtcgcaacgcttgattcacacgccggtaatcttccgcgcgaaggagctgtattaattgtaacggcgtcttataacggtcatccgcctgataacgcaaagcaatttgtcgattggttagaccaagcgtctgcggatgaagtaaaaccggttcgctactccgtatttggatgcggcgataaaaattgggcggggacgtatcaaaaagtgcctgcttttatcgatgaaacgcttgccgctaaaggggcagaaaacatcgctaagcgcggtgaagcagatgcaagcgacgactttgaaggcgcgtatgaagaatggcgtgatcatatgtggagtgacgtagcagcctactttggtctcgacattgaaaacagtgaagataataaatctactctttcacttcaatttgtcgacagcgcggcggatatgcctcttgcgaaaatgcacggtgcgttttcaacgaacgtcgtagcaagcaaagaacttcaacagcctggcagtgcacgaagcacgcgacatcttgaaattgaacttccaaaagaagcttcttatcaagaaggagatcatttaggtgttattcctcgctattatgaaggaatagtaaaccgtgtaacacagaggttcggcctaagcgcatcacagctgatccgtctggaagcagaagaagaaaaattagctcatttgccactcgctaaaacagtatccgtagaagagcttctgcaatacgtggagcttcaagatcctgttacgcgcacgcagcttcgcgcaatggctgctaaaacggtctgcccgccgcataaagtagagcttgaagccttgcttggcaagcaagcctacaaagaacaagtgctggcaaaacgtttaacaatgcttgaactgcttgaaaaatacccggcgtgtgaaatgagtttcagcgaatttatcgcccttctgccaagcatacgcccgcgctattactcgatttcttcatcacctcgtgtcgatctgaaacaagcaagcatcacggtcagcgttgtcagcggaccggcgtggagcggatatggagaatataaaggaattgcgtcgaactatcttgctgagctgcaagaaggagatacgattacgtgctttatttccacaccgcagtcagagtttacgctgccaaaagaccctgaaacgccgcttatcatggtcggaccgggaacaggcgtcgcgccgtttagaggctttgtgcaggcgcgcaaacagctaaaagaacaaggacagtcacttggagaagcacatttatacttcggctgccgttcacctcatgaagactatctgtatcaagaagagcttgaaaacgcccaaagcgaaggcatcattctgcttcataccgctttttctcgcatgccgaatcagccgaaaacatacgttcagcacgtaatggaacaagacggcaagaaattgattgaacttcttgatcaaggagcgcacttctatatttgcggagacggaattcaaatggcacctgccgttgaagcaacgcttatgaaaagctatgctgacgttcaccaagtgagtgaagcagacgctcgcttatggctgcagcagctagaagaaaaaggccgatacgcaaaagacgtgtggctgggg

SEQ ID NO: 1200 - protein, 1049 aa, synthetic construct
  REGION 1..1049: note = variant of P450 oxidase from Bacillus megaterium
MTIKEMPQPKTFGELKNLPLLNTDKPVQALMRIADELGEIFKFEAPGSVTRYLSSQRLIKEACDESRFDKNLSQGLKFARDFVGDGLVTSWTHEPNWKKAHNILVPSFSQHAMGRYHAMMVDIAVQLVQKWERLNADEHIEVSEDMTRLTLDTIGLCLFNYRFNSFYRDTPHPFIVSVVRALDEVMNKLQRANPDDPAYDENKRQCQEDIKVMNDYVDKIIADRKARGEQSHDLLTQMLNGKDPETGEPLDDGNIRQQIITFLIAGHQTTSGLLSFALYFLVKNPRVLQKVAEEAARVLVDPVPSYKQVKQLKYVGMVLNEALRLWPVAPMFSLYAKEDTVLGGEYPLTKGDEVMVLVPQLHRDKTIWGDDVEEFRPERFENPSAIPQHAFKPFGNGQRACIGQQFALHSATLVLGMMLKHFDFEDHTNYELVIKESRTLKPEGFVVKAKSKGIPLGGIPSPSTEQSAKKVRKKAENAHNTPLLVLYGSNAGTAEGTARDLADIAMSKGFAPQVATLDSHAGNLPREGAVLIVTASYNGHPPDNAKQFVDWLDQASADEVKPVRYSVFGCGDKNWAGTYQKVPAFIDETLAAKGAENIAKRGEADASDDFEGAYEEWRDHMWSDVAAYFGLDIENSEDNKSTLSLQFVDSAADMPLAKMHGAFSTNVVASKELQQPGSARSTRHLEIELPKEASYQEGDHLGVIPRYYEGIVNRVTQRFGLSASQLIRLEAEEEKLAHLPLAKTVSVEELLQYVELQDPVTRTQLRAMAAKTVCPPHKVELEALLGKQAYKEQVLAKRLTMLELLEKYPACEMSFSEFIALLPSIRPRYYSISSSPRVDLKQASITVSVVSGPAWSGYGEYKGIASNYLAELQEGDTITCFISTPQSEFTLPKDPETPLIMVGPGTGVAPFRGFVQARKQLKEQGQSLGEAHLYFGCRSPHEDYLYQEELENAQSEGIILLHTAFSRMPNQPKTYVQHVMEQDGKKLIELLDQGAHFYICGDGIQMAPAVEATLMKSYADVHQVSEADARLWLQQLEEKGRYAKDVWLG

SEQ ID NO: 1201 - DNA, 3147 bp, synthetic construct
  misc_feature 1..3147: note = variant of P450 oxidase from Bacillus megaterium
  source 1..3147: mol_type = other DNA
atgacaattaaggaaatgcctcagcctaagacgtttggagaacttaaaaatttaccgttattaaatacagataaaccggttcaagctttgatgcgtattgcggatgaattaggagaaatctttaaattcgaggcgcctggtagcgtaacgcgctatttatcaagtcagcgtctaattaaagaagcatgcgatgaatcacgctttgataaaaacttaagtcaagggcttaaatttgcacgtgattttgttggagacgggctggttacaagctggacgcatgaaccgaattggaaaaaagcgcataatatcttagttccaagctttagtcagcatgcaatggggcgttatcatgcgatgatggtcgatatcgccgtgcagcttgttcaaaagtgggagcgtctaaatgcagatgagcatattgaagtatcggaagacatgacacgtttaacgcttgatacaattggtctttgcctgtttaactatcgctttaacagcttttaccgagatacgcctcatccatttattgtgagtgtggttcgtgcactggatgaagtaatgaacaagctgcagcgagcaaatccagacgacccagcttatgatgaaaacaagcgccagtgtcaagaagatatcaaggtgatgaacgactatgtagataaaattattgcagatcgcaaagcaaggggtgaacaaagtcatgatttattaacgcagatgctaaacggaaaagatccagaaacgggtgagccgcttgatgacgggaacattcgtcagcaaattattacattcttaattgcgggacaccaaacgacaagtggtcttttatcatttgcgctgtatttcttagtgaaaaatccacgtgtattacaaaaagtagcagaagaagcagcacgagttctagtagatcctgttccaagctacaaacaagtcaaacagcttaaatatgttggcatggtcttaaacgaagcgctgcgcttatggccagtagcgcctatgttttccctatatgcaaaagaagatacggtgcttggaggagaatatcctttaacgaaaggcgacgaagtaatggttctggtgcctcagcttcaccgtgataaaacaatttggggagacgatgtggaggagttccgtccagagcgttttgaaaatccaagtgcgattccgcagcatgcgtttaaaccgtttggaaacggtcagcgtgcgtgtatcggtcagcagttcgctcttcatagtgcaacgctggtacttggtatgatgctaaaacactttgactttgaagatcatacaaactacgagctcgttattaaagaatcgcggacgttaaaacctgaaggctttgtggtaaaagcaaaatcgaaaggcattccgcttggcggtattccttcacctagcactgaacagtctgctaaaaaagtacgcaaaaaggcagaaaacgctcataatacgccgctgcttgtgctatacggttcaaatgcgggaacagctgaaggaacggcgcgtgatttagcagatattgcaatgagcaaaggatttgcaccgcaggtcgcaacgcttgattcacacgccggtaatcttccgcgcgaaggagctgtattaattgtaacggcgtcttataacggtcatccgcctgataacgcaaagcaatttgtcgattggttagaccaagcgtctgcggatgaagtaaaaggctctcgctactccgtatttggatgcggcgataaaaattgggcggggacgtatcaaaaagtgcctgcttttatcgatgaaacgcttgccgctaaaggggcagaaaacatcgctaagcgcggtgaagcagatgcaagcgacgactttgaaggcgcgtatgaagaatggcgtgatcatatgtggagtgacgtagcagcctactttggtctcgacattgaaaacagtgaagataataaatctactctttcacttcaatttgtcgacagcgcggcggatatgcctcttgcgaaaatgcacggtgcgttttcaacgaacgtcgtagcaagcaaagaacttcaacagcctggcagtgcacgaagcacgcgacatcttgaaattgaacttccaaaagaagcttcttatcaagaaggagatcatttaggtgttattcctcgctattatgaaggaatagtaaaccgtgtaacacagaggttcggcctaagcgcatcacagctgatccgtctggaagcagaagaagaaaaattagctcatttgccactcgctaaaacagtatccgtagaagagcttctgcaatacgtggagcttcaagatcctgttacgcgcacgcagcttcgcgcaatggctgctaaaacggtctgcccgccgcataaagtagagcttgaagccttgcttggcaagcaagcctacaaagaacaagtgctggcaaaacgtttaacaatgcttgaactgcttgaaaaatacccggcgtgtgaaatgagtttcagcgaatttatcgcccttctgccaagcatacgcccgcgctattactcgatttcttcatcacctcgtgtcgatctgaaacaagcaagcatcacggtcagcgttgtcagcggaccggcgtggagcggatatggagaatataaaggaattgcgtcgaactatcttgctgagctgcaagaaggagatacgattacgtgctttatttccacaccgcagtcagagtttacgctgccaaaagaccctgaaacgccgcttatcatggtcggaccgggaacaggcgtcgcgccgtttagaggctttgtgcaggcgcgcaaacagctaaaagaacaaggacagtcacttggagaagcacatttatacttcggctgccgttcacctcatgaagactatctgtatcaagaagagcttgaaaacgcccaaagcgaaggcatcattctgcttcataccgctttttctcgcatgccgaatcagccgaaaacatacgttcagcacgtaatggaacaagacggcaagaaattgattgaacttcttgatcaaggagcgcacttctatatttgcggagacggaattcaaatggcacctgccgttgaagcaacgcttatgaaaagctatgctgacgttcaccaagtgagtgaagcagacgctcgcttatggctgcagcagctagaagaaaaaggccgatacgcaaaagacgtgtggctgggg

SEQ ID NO: 1202 - protein, 1049 aa, synthetic construct
  REGION 1..1049: note = variant of P450 oxidase from Bacillus megaterium
MTIKEMPQPKTFGELKNLPLLNTDKPVQALMRIADELGEIFKFEAPGSVTRYLSSQRLIKEACDESRFDKNLSQGLKFARDFVGDGLVTSWTHEPNWKKAHNILVPSFSQHAMGRYHAMMVDIAVQLVQKWERLNADEHIEVSEDMTRLTLDTIGLCLFNYRFNSFYRDTPHPFIVSVVRALDEVMNKLQRANPDDPAYDENKRQCQEDIKVMNDYVDKIIADRKARGEQSHDLLTQMLNGKDPETGEPLDDGNIRQQIITFLIAGHQTTSGLLSFALYFLVKNPRVLQKVAEEAARVLVDPVPSYKQVKQLKYVGMVLNEALRLWPVAPMFSLYAKEDTVLGGEYPLTKGDEVMVLVPQLHRDKTIWGDDVEEFRPERFENPSAIPQHAFKPFGNGQRACIGQQFALHSATLVLGMMLKHFDFEDHTNYELVIKESRTLKPEGFVVKAKSKGIPLGGIPSPSTEQSAKKVRKKAENAHNTPLLVLYGSNAGTAEGTARDLADIAMSKGFAPQVATLDSHAGNLPREGAVLIVTASYNGHPPDNAKQFVDWLDQASADEVKGSRYSVFGCGDKNWAGTYQKVPAFIDETLAAKGAENIAKRGEADASDDFEGAYEEWRDHMWSDVAAYFGLDIENSEDNKSTLSLQFVDSAADMPLAKMHGAFSTNVVASKELQQPGSARSTRHLEIELPKEASYQEGDHLGVIPRYYEGIVNRVTQRFGLSASQLIRLEAEEEKLAHLPLAKTVSVEELLQYVELQDPVTRTQLRAMAAKTVCPPHKVELEALLGKQAYKEQVLAKRLTMLELLEKYPACEMSFSEFIALLPSIRPRYYSISSSPRVDLKQASITVSVVSGPAWSGYGEYKGIASNYLAELQEGDTITCFISTPQSEFTLPKDPETPLIMVGPGTGVAPFRGFVQARKQLKEQGQSLGEAHLYFGCRSPHEDYLYQEELENAQSEGIILLHTAFSRMPNQPKTYVQHVMEQDGKKLIELLDQGAHFYICGDGIQMAPAVEATLMKSYADVHQVSEADARLWLQQLEEKGRYAKDVWLG

SEQ ID NO: 1203 - DNA, 3147 bp, synthetic construct
  misc_feature 1..3147: note = variant of P450 oxidase from Bacillus megaterium
  source 1..3147: mol_type = other DNA
atgacaattaaggaaatgcctcagcctaagacgtttggagaacttaaaaatttaccgttattaaatacagataaaccggttcaagctttgatgcgtattgcggatgaattaggagaaatctttaaattcgaggcgcctggtagcgtaacgcgctatttatcaagtcagcgtctaattaaagaagcatgcgatgaatcacgctttgataaaaacttaagtcaagggcttaaatttgcacgtgattttgttggagacgggctggttacaagctggacgcatgaaccgaattggaaaaaagcgcataatatcttagttccaagctttagtcagcatgcaatggggcgttatcatgcgatgatggtcgatatcgccgtgcagcttgttcaaaagtgggagcgtctaaatgcagatgagcatattgaagtatcggaagacatgacacgtttaacgcttgatacaattggtctttgcctgtttaactatcgctttaacagcttttaccgagatacgcctcatccatttattgtgagtgtggttcgtgcactggatgaagtaatgaacaagctgcagcgagcaaatccagacgacccagcttatgatgaaaacaagcgccagtgtcaagaagatatcaaggtgatgaacgactatgtagataaaattattgcagatcgcaaagcaaggggtgaacaaagtcatgatttattaacgcagatgctaaacggaaaagatccagaaacgggtgagccgcttgatgacgggaacattcgtcagcaaattattacattcttaattgcgggacaccaaacgacaagtggtcttttatcatttgcgctgtatttcttagtgaaaaatccacgtgtattacaaaaagtagcagaagaagcagcacgagttctagtagatcctgttccaagctacaaacaagtcaaacagcttaaatatgttggcatggtcttaaacgaagcgctgcgcttatggccagtagcgcctatgttttccctatatgcaaaagaagatacggtgcttggaggagaatatcctttaacgaaaggcgacgaagtaatggttctggtgcctcagcttcaccgtgataaaacaatttggggagacgatgtggaggagttccgtccagagcgttttgaaaatccaagtgcgattccgcagcatgcgtttaaaccgtttggaaacggtcagcgtgcgtgtatcggtcagcagttcgctcttcatagtgcaacgctggtacttggtatgatgctaaaacactttgactttgaagatcatacaaactacgagctcgttattaaagaatcgcggacgttaaaacctgaaggctttgtggtaaaagcaaaatcgaaaggcattccgcttggcggtattccttcacctagcactgaacagtctgctaaaaaagtacgcaaaaaggcagaaaacgctcataatacgccgctgcttgtgctatacggttcaaatgcgggaacagctgaaggaacggcgcgtgatttagcagatattgcaatgagcaaaggatttgcaccgcaggtcgcaacgcttgattcacacgccggtaatcttccgcgcgaaggagctgtattaattgtaacggcgtcttataacggtcatccgcctgataacgcaaagcaatttgtcgattggttagaccaagcgtctgcggatgaagtaaaaggcgttcgctactccgtatttggatgcggcgataaaaattgggcggggacgtatcaaaaagtgcctgcttttatcgatgaaacgcttgccgctaaaggggcagaaaacatcgctaagcgcggtgaagcagatgcaagcgacgactttgaaggcgcgtatgaagaatggcgtgatcatatgtggagtgacgtagcagcctactttggtctcgacattgaaaacagtgaagataataaatctactctttcacttcaatttgtcgacagcgcggcggatatgcctcttgcgaaaatgcacggtgcgttttcaacgagggtcgtagcaagcaaagaacttcaacagcctggcagtgcacgaagcacgcgacatcttgaaattgaacttccaaaagaagcttcttatcaagaaggagatcatttaggtgttattcctcgctattatgaaggaatagtaaaccgtgtaacacagaggttcggcctaagcgcatcacagctgatccgtctggaagcagaagaagaaaaattagctcatttgccactcgctaaaacagtatccgtagaagagcttctgcaatacgtggagcttcaagatcctgttacgcgcacgcagcttcgcgcaatggctgctaaaacggtctgcccgccgcataaagtagagcttgaagccttgcttggcaagcaagcctacaaagaacaagtgctggcaaaacgtttaacaatgcttgaactgcttgaaaaatacccggcgtgtgaaatgagtttcagcgaatttatcgcccttctgccaagcatacgcccgcgctattactcgatttcttcatcacctcgtgtcgatctgaaacaagcaagcatcacggtcagcgttgtcagcggaccggcgtggagcggatatggagaatataaaggaattgcgtcgaactatcttgctgagctgcaagaaggagatacgattacgtgctttatttccacaccgcagtcagagtttacgctgccaaaagaccctgaaacgccgcttatcatggtcggaccgggaacaggcgtcgcgccgtttagaggctttgtgcaggcgcgcaaacagctaaaagaacaaggacagtcacttggagaagcacatttatacttcggctgccgttcacctcatgaagactatctgtatcaagaagagcttgaaaacgcccaaagcgaaggcatcattctgcttcataccgctttttctcgcatgccgaatcagccgaaaacatacgttcagcacgtaatggaacaagacggcaagaaattgattgaacttcttgatcaaggagcgcacttctatatttgcggagacggaattcaaatggcacctgccgttgaagcaacgcttatgaaaagctatgctgacgttcaccaagtgagtgaagcagacgctcgcttatggctgcagcagctagaagaaaaaggccgatacgcaaaagacgtgtggctgggg

SEQ ID NO: 1204 - protein, 1049 aa, synthetic construct
  REGION 1..1049: note = variant of P450 oxidase from Bacillus megaterium
MTIKEMPQPKTFGELKNLPLLNTDKPVQALMRIADELGEIFKFEAPGSVTRYLSSQRLIKEACDESRFDKNLSQGLKFARDFVGDGLVTSWTHEPNWKKAHNILVPSFSQHAMGRYHAMMVDIAVQLVQKWERLNADEHIEVSEDMTRLTLDTIGLCLFNYRFNSFYRDTPHPFIVSVVRALDEVMNKLQRANPDDPAYDENKRQCQEDIKVMNDYVDKIIADRKARGEQSHDLLTQMLNGKDPETGEPLDDGNIRQQIITFLIAGHQTTSGLLSFALYFLVKNPRVLQKVAEEAARVLVDPVPSYKQVKQLKYVGMVLNEALRLWPVAPMFSLYAKEDTVLGGEYPLTKGDEVMVLVPQLHRDKTIWGDDVEEFRPERFENPSAIPQHAFKPFGNGQRACIGQQFALHSATLVLGMMLKHFDFEDHTNYELVIKESRTLKPEGFVVKAKSKGIPLGGIPSPSTEQSAKKVRKKAENAHNTPLLVLYGSNAGTAEGTARDLADIAMSKGFAPQVATLDSHAGNLPREGAVLIVTASYNGHPPDNAKQFVDWLDQASADEVKGVRYSVFGCGDKNWAGTYQKVPAFIDETLAAKGAENIAKRGEADASDDFEGAYEEWRDHMWSDVAAYFGLDIENSEDNKSTLSLQFVDSAADMPLAKMHGAFSTRVVASKELQQPGSARSTRHLEIELPKEASYQEGDHLGVIPRYYEGIVNRVTQRFGLSASQLIRLEAEEEKLAHLPLAKTVSVEELLQYVELQDPVTRTQLRAMAAKTVCPPHKVELEALLGKQAYKEQVLAKRLTMLELLEKYPACEMSFSEFIALLPSIRPRYYSISSSPRVDLKQASITVSVVSGPAWSGYGEYKGIASNYLAELQEGDTITCFISTPQSEFTLPKDPETPLIMVGPGTGVAPFRGFVQARKQLKEQGQSLGEAHLYFGCRSPHEDYLYQEELENAQSEGIILLHTAFSRMPNQPKTYVQHVMEQDGKKLIELLDQGAHFYICGDGIQMAPAVEATLMKSYADVHQVSEADARLWLQQLEEKGRYAKDVWLG

SEQ ID NO: 1205 - DNA, 3147 bp, synthetic construct
  misc_feature 1..3147: note = variant of P450 oxidase from Bacillus megaterium
  source 1..3147: mol_type = other DNA
atgacaattaaggaaatgcctcagcctaagacgtttggagaacttaaaaatttaccgttattaaatacagataaaccggttcaagctttgatgcgtattgcggatgaattaggagaaatctttaaattcgaggcgcctggtagcgtaacgcgctatttatcaagtcagcgtctaattaaagaagcatgcgatgaatcacgctttgataaaaacttaagtcaagggcttaaatttgcacgtgattttgttggagacgggctggttacaagctggacgcatgaaccgaattggaaaaaagcgcataatatcttagttccaagctttagtcagcatgcaatggggcgttatcatgcgatgatggtcgatatcgccgtgcagcttgttcaaaagtgggagcgtctaaatgcagatgagcatattgaagtatcggaagacatgacacgtttaacgcttgatacaattggtctttgcctgtttaactatcgctttaacagcttttaccgagatacgcctcatccatttattgtgagtgtggttcgtgcactggatgaagtaatgaacaagctgcagcgagcaaatccagacgacccagcttatgatgaaaacaagcgccagtgtcaagaagatatcaaggtgatgaacgactatgtagataaaattattgcagatcgcaaagcaaggggtgaacaaagtcatgatttattaacgcagatgctaaacggaaaagatccagaaacgggtgagccgcttgatgacgggaacattcgtcagcaaattattacattcttaattgcgggacaccaaacgacaagtggtcttttatcatttgcgctgtatttcttagtgaaaaatccacgtgtattacaaaaagtagcagaagaagcagcacgagttctagtagatcctgttccaagctacaaacaagtcaaacagcttaaatatgttggcatggtcttaaacgaagcgctgcgcttatggccagtagcgcctatgttttccctatatgcaaaagaagatacggtgcttggaggagaatatcctttaacgaaaggcgacgaagtaatggttctggtgcctcagcttcaccgtgataaaacaatttggggagacgatgtggaggagttccgtccagagcgttttgaaaatccaagtgcgattccgcagcatgcgtttaaaccgtttggaaacggtcagcgtgcgtgtatcggtcagcagttcgctcttcatagtgcaacgctggtacttggtatgatgctaaaacactttgactttgaagatcatacaaactacgagctcgttattaaagaatcgcggacgttaaaacctgaaggctttgtggtaaaagcaaaatcgaaaggcattccgcttggcggtattccttcacctagcactgaacagtctgctaaaaaagtacgcaaaaaggcagaaaacgctcataatacgccgctgcttgtgctatacggttcaaatgcgggaacagctgaaggaacggcgcgtgatttagcagatattgcaatgagcaaaggatttgcaccgcaggtcgcaacgcttgattcacacgccggtaatcttccgcgcgaaggagctgtattaattgtaacggcgtcttataacggtcatccgcctgataacgcaaagcaatttgtcgattggttagaccaagcgtctgcggatgaagtaaaaggcgttcgctactccgtatttggatgcggcgataaaaattgggcggggacgtatcaaaaagtgcctgcttttatcgatgaaacgcttgccgctaaaggggcagaaaacatcgctaagcgcggtgaagcagatgcaagcgacgactttgaaggcgcgtatgaagaatggcgtgatcatatgtggagtgacgtagcagcctactttggtctcgacattgaaaacagtgaagataatctgtctactctttcacttcaatttgtcgacagcgcggcggatatgcctcttgcgaaaatgcacggtgcgttttcaacgaacgtcgtagcaagcaaagaacttcaacagcctggcagtgcacgaagcacgcgacatcttgaaattgaacttccaaaagaagcttcttatcaagaaggagatcatttaggtgttattcctcgctattatgaaggaatagtaaaccgtgtaacacagaggttcggcctaagcgcatcacagctgatccgtctggaagcagaagaagaaaaattagctcatttgccactcgctaaaacagtatccgtagaagagcttctgcaatacgtggagcttcaagatcctgttacgcgcacgcagcttcgcgcaatggctgctaaaacggtctgcccgccgcataaagtagagcttgaagccttgcttggcaagcaagcctacaaagaacaagtgctggcaaaacgtttaacaatgcttgaactgcttgaaaaatacccggcgtgtgaaatgagtttcagcgaatttatcgcccttctgccaagcatacgcccgcgctattactcgatttcttcatcacctcgtgtcgatctgaaacaagcaagcatcacggtcagcgttgtcagcggaccggcgtggagcggatatggagaatataaaggaattgcgtcgaactatcttgctgagctgcaagaaggagatacgattacgtgctttatttccacaccgcagtcagagtttacgctgccaaaagaccctgaaacgccgcttatcatggtcggaccgggaacaggcgtcgcgccgtttagaggctttgtgcaggcgcgcaaacagctaaaagaacaaggacagtcacttggagaagcacatttatacttcggctgccgttcacctcatgaagactatctgtatcaagaagagcttgaaaacgcccaaagcgaaggcatcattctgcttcataccgctttttctcgcatgccgaatcagccgaaaacatacgttcagcacgtaatggaacaagacggcaagaaattgattgaacttcttgatcaaggagcgcacttctatatttgcggagacggaattcaaatggcacctgccgttgaagcaacgcttatgaaaagctatgctgacgttcaccaagtgagtgaagcagacgctcgcttatggctgcagcagctagaagaaaaaggccgatacgcaaaagacgtgtggctgggg

SEQ ID NO: 1206 - protein, 1049 aa, synthetic construct
  REGION 1..1049: note = variant of P450 oxidase from Bacillus megaterium
MTIKEMPQPKTFGELKNLPLLNTDKPVQALMRIADELGEIFKFEAPGSVTRYLSSQRLIKEACDESRFDKNLSQGLKFARDFVGDGLVTSWTHEPNWKKAHNILVPSFSQHAMGRYHAMMVDIAVQLVQKWERLNADEHIEVSEDMTRLTLDTIGLCLFNYRFNSFYRDTPHPFIVSVVRALDEVMNKLQRANPDDPAYDENKRQCQEDIKVMNDYVDKIIADRKARGEQSHDLLTQMLNGKDPETGEPLDDGNIRQQIITFLIAGHQTTSGLLSFALYFLVKNPRVLQKVAEEAARVLVDPVPSYKQVKQLKYVGMVLNEALRLWPVAPMFSLYAKEDTVLGGEYPLTKGDEVMVLVPQLHRDKTIWGDDVEEFRPERFENPSAIPQHAFKPFGNGQRACIGQQFALHSATLVLGMMLKHFDFEDHTNYELVIKESRTLKPEGFVVKAKSKGIPLGGIPSPSTEQSAKKVRKKAENAHNTPLLVLYGSNAGTAEGTARDLADIAMSKGFAPQVATLDSHAGNLPREGAVLIVTASYNGHPPDNAKQFVDWLDQASADEVKGVRYSVFGCGDKNWAGTYQKVPAFIDETLAAKGAENIAKRGEADASDDFEGAYEEWRDHMWSDVAAYFGLDIENSEDNLSTLSLQFVDSAADMPLAKMHGAFSTNVVASKELQQPGSARSTRHLEIELPKEASYQEGDHLGVIPRYYEGIVNRVTQRFGLSASQLIRLEAEEEKLAHLPLAKTVSVEELLQYVELQDPVTRTQLRAMAAKTVCPPHKVELEALLGKQAYKEQVLAKRLTMLELLEKYPACEMSFSEFIALLPSIRPRYYSISSSPRVDLKQASITVSVVSGPAWSGYGEYKGIASNYLAELQEGDTITCFISTPQSEFTLPKDPETPLIMVGPGTGVAPFRGFVQARKQLKEQGQSLGEAHLYFGCRSPHEDYLYQEELENAQSEGIILLHTAFSRMPNQPKTYVQHVMEQDGKKLIELLDQGAHFYICGDGIQMAPAVEATLMKSYADVHQVSEADARLWLQQLEEKGRYAKDVWLG

SEQ ID NO: 1207 - DNA, 3147 bp, synthetic construct
  misc_feature 1..3147: note = variant of P450 oxidase from Bacillus megaterium
  source 1..3147: mol_type = other DNA
atgacaattaaggaaatgcctcagcctaagacgtttggagaacttaaaaatttaccgttattaaatacagataaaccggttcaagctttgatgcgtattgcggatgaattaggagaaatctttaaattcgaggcgcctggtagcgtaacgcgctatttatcaagtcagcgtctaattaaagaagcatgcgatgaatcacgctttgataaaaacttaagtcaagggcttaaatttgcacgtgattttgttggagacgggctggttacaagctggacgcatgaaccgaattggaaaaaagcgcataatatcttagttccaagctttagtcagcatgcaatggggcgttatcatgcgatgatggtcgatatcgccgtgcagcttgttcaaaagtgggagcgtctaaatgcagatgagcatattgaagtatcggaagacatgacacgtttaacgcttgatacaattggtctttgcctgtttaactatcgctttaacagcttttaccgagatacgcctcatccatttattgtgagtgtggttcgtgcactggatgaagtaatgaacaagctgcagcgagcaaatccagacgacccagcttatgatgaaaacaagcgccagtgtcaagaagatatcaaggtgatgaacgactatgtagataaaattattgcagatcgcaaagcaaggggtgaacaaagtcatgatttattaacgcagatgctaaacggaaaagatccagaaacgggtgagccgcttgatgacgggaacattcgtcagcaaattattacattcttaattgcgggacaccaaacgacaagtggtcttttatcatttgcgctgtatttcttagtgaaaaatccacgtgtattacaaaaagtagcagaagaagcagcacgagttctagtagatcctgttccaagctacaaacaagtcaaacagcttaaatatgttggcatggtcttaaacgaagcgctgcgcttatggccagtagcgcctatgttttccctatatgcaaaagaagatacggtgcttggaggagaatatcctttaacgaaaggcgacgaagtaatggttctggtgcctcagcttcaccgtgataaaacaatttggggagacgatgtggaggagttccgtccagagcgttttgaaaatccaagtgcgattccgcagcatgcgtttaaaccgtttggaaacggtcagcgtgcgtgtatcggtcagcagttcgctcttcatagtgcaacgctggtacttggtatgatgctaaaacactttgactttgaagatcatacaaactacgagctcgttattaaagaatcgcggacgttaaaacctgaaggctttgtggtaaaagcaaaatcgaaaggcattccgcttggcggtattccttcacctagcactgaacagtctgctaaaaaagtacgcaaaaaggcagaaaacgctcataatacgccgctgcttgtgctatacggttcaaatgcgggaacagctgaaggaacggcgcgtgatttagcagatattgcaatgagcaaaggatttgcaccgcaggtcgcaacgcttgattcacacgccggtaatcttccgcgcgaaggagctgtattaattgtaacggcgtcttataacggtcatccgcctgataacgcaaagcaatttgtcgattggttagaccaagcgtctgcggatgaagtaaaaggcgttcgctactccgtatttggatgcggcgataaaaattgggcggggacgtatcaaaaagtgcctgcttttatcgatgaaacgcttgccgctaaaggggcagaaaacatcgctaagcgcggtgaagcagatgcaagcgacgactttgaaggcgcgtatgaagaatggcgtgatcatatgtggagtgacgtagcagcctactttggtctcgacattgaaaacagtgaagataataaatctactctttcacttcaatttgtcgacagcgcggcggcgatgcctcttgcgaaaatgcacggtgcgttttcaacgaacgtcgtagcaagcaaagaacttcaacagcctggcagtgcacgaagcacgcgacatcttgaaattgaacttccaaaagaagcttcttatcaagaaggagatcatttaggtgttattcctcgctattatgaaggaatagtaaaccgtgtaacacagaggttcggcctaagcgcatcacagctgatccgtctggaagcagaagaagaaaaattagctcatttgccactcgctaaaacagtatccgtagaagagcttctgcaatacgtggagcttcaagatcctgttacgcgcacgcagcttcgcgcaatggctgctaaaacggtctgcccgccgcataaagtagagcttgaagccttgcttggcaagcaagcctacaaagaacaagtgctggcaaaacgtttaacaatgcttgaactgcttgaaaaatacccggcgtgtgaaatgagtttcagcgaatttatcgcccttctgccaagcatacgcccgcgctattactcgatttcttcatcacctcgtgtcgatctgaaacaagcaagcatcacggtcagcgttgtcagcggaccggcgtggagcggatatggagaatataaaggaattgcgtcgaactatcttgctgagctgcaagaaggagatacgattacgtgctttatttccacaccgcagtcagagtttacgctgccaaaagaccctgaaacgccgcttatcatggtcggaccgggaacaggcgtcgcgccgtttagaggctttgtgcaggcgcgcaaacagctaaaagaacaaggacagtcacttggagaagcacatttatacttcggctgccgttcacctcatgaagactatctgtatcaagaagagcttgaaaacgcccaaagcgaaggcatcattctgcttcataccgctttttctcgcatgccgaatcagccgaaaacatacgttcagcacgtaatggaacaagacggcaagaaattgattgaacttcttgatcaaggagcgcacttctatatttgcggagacggaattcaaatggcacctgccgttgaagcaacgcttatgaaaagctatgctgacgttcaccaagtgagtgaagcagacgctcgcttatggctgcagcagctagaagaaaaaggccgatacgcaaaagacgtgtggctgggg

SEQ ID NO: 1208 - protein, 1049 aa, synthetic construct
  REGION 1..1049: note = variant of P450 oxidase from Bacillus megaterium
MTIKEMPQPKTFGELKNLPLLNTDKPVQALMRIADELGEIFKFEAPGSVTRYLSSQRLIKEACDESRFDKNLSQGLKFARDFVGDGLVTSWTHEPNWKKAHNILVPSFSQHAMGRYHAMMVDIAVQLVQKWERLNADEHIEVSEDMTRLTLDTIGLCLFNYRFNSFYRDTPHPFIVSVVRALDEVMNKLQRANPDDPAYDENKRQCQEDIKVMNDYVDKIIADRKARGEQSHDLLTQMLNGKDPETGEPLDDGNIRQQIITFLIAGHQTTSGLLSFALYFLVKNPRVLQKVAEEAARVLVDPVPSYKQVKQLKYVGMVLNEALRLWPVAPMFSLYAKEDTVLGGEYPLTKGDEVMVLVPQLHRDKTIWGDDVEEFRPERFENPSAIPQHAFKPFGNGQRACIGQQFALHSATLVLGMMLKHFDFEDHTNYELVIKESRTLKPEGFVVKAKSKGIPLGGIPSPSTEQSAKKVRKKAENAHNTPLLVLYGSNAGTAEGTARDLADIAMSKGFAPQVATLDSHAGNLPREGAVLIVTASYNGHPPDNAKQFVDWLDQASADEVKGVRYSVFGCGDKNWAGTYQKVPAFIDETLAAKGAENIAKRGEADASDDFEGAYEEWRDHMWSDVAAYFGLDIENSEDNKSTLSLQFVDSAAAMPLAKMHGAFSTNVVASKELQQPGSARSTRHLEIELPKEASYQEGDHLGVIPRYYEGIVNRVTQRFGLSASQLIRLEAEEEKLAHLPLAKTVSVEELLQYVELQDPVTRTQLRAMAAKTVCPPHKVELEALLGKQAYKEQVLAKRLTMLELLEKYPACEMSFSEFIALLPSIRPRYYSISSSPRVDLKQASITVSVVSGPAWSGYGEYKGIASNYLAELQEGDTITCFISTPQSEFTLPKDPETPLIMVGPGTGVAPFRGFVQARKQLKEQGQSLGEAHLYFGCRSPHEDYLYQEELENAQSEGIILLHTAFSRMPNQPKTYVQHVMEQDGKKLIELLDQGAHFYICGDGIQMAPAVEATLMKSYADVHQVSEADARLWLQQLEEKGRYAKDVWLG

SEQ ID NO: 1209 - DNA, 3147 bp, synthetic construct
  misc_feature 1..3147: note = variant of P450 oxidase from Bacillus megaterium
  source 1..3147: mol_type = other DNA
atgacaattaaggaaatgcctcagcctaagacgtttggagaacttaaaaatttaccgttattaaatacagataaaccggttcaagctttgatgcgtattgcggatgaattaggagaaatctttaaattcgaggcgcctggtagcgtaacgcgctatttatcaagtcagcgtctaattaaagaagcatgcgatgaatcacgctttgataaaaacttaagtcaagggcttaaatttgcacgtgattttgttggagacgggctggttacaagctggacgcatgaaccgaattggaaaaaagcgcataatatcttagttccaagctttagtcagcatgcaatggggcgttatcatgcgatgatggtcgatatcgccgtgcagcttgttcaaaagtgggagcgtctaaatgcagatgagcatattgaagtatcggaagacatgacacgtttaacgcttgatacaattggtctttgcctgtttaactatcgctttaacagcttttaccgagatacgcctcatccatttattgtgagtgtggttcgtgcactggatgaagtaatgaacaagctgcagcgagcaaatccagacgacccagcttatgatgaaaacaagcgccagtgtcaagaagatatcaaggtgatgaacgactatgtagataaaattattgcagatcgcaaagcaaggggtgaacaaagtcatgatttattaacgcagatgctaaacggaaaagatccagaaacgggtgagccgcttgatgacgggaacattcgtcagcaaattattacattcttaattgcgggacaccaaacgacaagtggtcttttatcatttgcgctgtatttcttagtgaaaaatccacgtgtattacaaaaagtagcagaagaagcagcacgagttctagtagatcctgttccaagctacaaacaagtcaaacagcttaaatatgttggcatggtcttaaacgaagcgctgcgcttatggccagtagcgcctatgttttccctatatgcaaaagaagatacggtgcttggaggagaatatcctttaacgaaaggcgacgaagtaatggttctggtgcctcagcttcaccgtgataaaacaatttggggagacgatgtggaggagttccgtccagagcgttttgaaaatccaagtgcgattccgcagcatgcgtttaaaccgtttggaaacggtcagcgtgcgtgtatcggtcagcagttcgctcttcatagtgcaacgctggtacttggtatgatgctaaaacactttgactttgaagatcatacaaactacgagctcgttattaaagaatcgcggacgttaaaacctgaaggctttgtggtaaaagcaaaatcgaaaggcattccgcttggcggtattccttcacctagcactgaacagtctgctaaaaaagtacgcaaaaaggcagaaaacgctcataatacgccgctgcttgtgctatacggttcaaatgcgggaacagctgaaggaacggcgcgtgatttagcagatattgcaatgagcaaaggatttgcaccgcaggtcgcaacgcttgattcacacgccggtaatcttccgcgcgaaggagctgtattaattgtaacggcgtcttataacggtcatccgcctgataacgcaaagcaatttgtcgattggttagaccaagcgtctgcggatgaagtaaaaggcgttcgctactccgtatttggatgcggcgataaaaattgggcggggacgtatcaaaaagtgcctgcttttatcgatgaaacgcttgccgctaaaggggcagaaaacatcgctaagcgcggtgaagcagatgcaagcgacgactttgaaggcgcgtatgaagaatggcgtgggcatatgtggagtgacgtagcagcctactttggtctcgacattgaaaacagtgaagataataaatctactctttcacttcaatttgtcgacagcgcggcggatatgcctcttgcgaaaatgcacggtgcgttttcaacgaacgtcgtagcaagcaaagaacttcaacagcctggcagtgcacgaagcacgcgacatcttgaaattgaacttccaaaagaagcttcttatcaagaaggagatcatttaggtgttattcctcgctattatgaaggaatagtaaaccgtgtaacacagaggttcggcctaagcgcatcacagctgatccgtctggaagcagaagaagaaaaattagctcatttgccactcgctaaaacagtatccgtagaagagcttctgcaatacgtggagcttcaagatcctgttacgcgcacgcagcttcgcgcaatggctgctaaaacggtctgcccgccgcataaagtagagcttgaagccttgcttggcaagcaagcctacaaagaacaagtgctggcaaaacgtttaacaatgcttgaactgcttgaaaaatacccggcgtgtgaaatgagtttcagcgaatttatcgcccttctgccaagcatacgcccgcgctattactcgatttcttcatcacctcgtgtcgatctgaaacaagcaagcatcacggtcagcgttgtcagcggaccggcgtggagcggatatggagaatataaaggaattgcgtcgaactatcttgctgagctgcaagaaggagatacgattacgtgctttatttccacaccgcagtcagagtttacgctgccaaaagaccctgaaacgccgcttatcatggtcggaccgggaacaggcgtcgcgccgtttagaggctttgtgcaggcgcgcaaacagctaaaagaacaaggacagtcacttggagaagcacatttatacttcggctgccgttcacctcatgaagactatctgtatcaagaagagcttgaaaacgcccaaagcgaaggcatcattctgcttcataccgctttttctcgcatgccgaatcagccgaaaacatacgttcagcacgtaatggaacaagacggcaagaaattgattgaacttcttgatcaaggagcgcacttctatatttgcggagacggaattcaaatggcacctgccgttgaagcaacgcttatgaaaagctatgctgacgttcaccaagtgagtgaagcagacgctcgcttatggctgcagcagctagaagaaaaaggccgatacgcaaaagacgtgtggctgggg

SEQ ID NO: 1210 - protein, 1049 aa, synthetic construct
  REGION 1..1049: note = variant of P450 oxidase from Bacillus megaterium
MTIKEMPQPKTFGELKNLPLLNTDKPVQALMRIADELGEIFKFEAPGSVTRYLSSQRLIKEACDESRFDKNLSQGLKFARDFVGDGLVTSWTHEPNWKKAHNILVPSFSQHAMGRYHAMMVDIAVQLVQKWERLNADEHIEVSEDMTRLTLDTIGLCLFNYRFNSFYRDTPHPFIVSVVRALDEVMNKLQRANPDDPAYDENKRQCQEDIKVMNDYVDKIIADRKARGEQSHDLLTQMLNGKDPETGEPLDDGNIRQQIITFLIAGHQTTSGLLSFALYFLVKNPRVLQKVAEEAARVLVDPVPSYKQVKQLKYVGMVLNEALRLWPVAPMFSLYAKEDTVLGGEYPLTKGDEVMVLVPQLHRDKTIWGDDVEEFRPERFENPSAIPQHAFKPFGNGQRACIGQQFALHSATLVLGMMLKHFDFEDHTNYELVIKESRTLKPEGFVVKAKSKGIPLGGIPSPSTEQSAKKVRKKAENAHNTPLLVLYGSNAGTAEGTARDLADIAMSKGFAPQVATLDSHAGNLPREGAVLIVTASYNGHPPDNAKQFVDWLDQASADEVKGVRYSVFGCGDKNWAGTYQKVPAFIDETLAAKGAENIAKRGEADASDDFEGAYEEWRGHMWSDVAAYFGLDIENSEDNKSTLSLQFVDSAADMPLAKMHGAFSTNVVASKELQQPGSARSTRHLEIELPKEASYQEGDHLGVIPRYYEGIVNRVTQRFGLSASQLIRLEAEEEKLAHLPLAKTVSVEELLQYVELQDPVTRTQLRAMAAKTVCPPHKVELEALLGKQAYKEQVLAKRLTMLELLEKYPACEMSFSEFIALLPSIRPRYYSISSSPRVDLKQASITVSVVSGPAWSGYGEYKGIASNYLAELQEGDTITCFISTPQSEFTLPKDPETPLIMVGPGTGVAPFRGFVQARKQLKEQGQSLGEAHLYFGCRSPHEDYLYQEELENAQSEGIILLHTAFSRMPNQPKTYVQHVMEQDGKKLIELLDQGAHFYICGDGIQMAPAVEATLMKSYADVHQVSEADARLWLQQLEEKGRYAKDVWLG

SEQ ID NO: 1211 - DNA, 3147 bp, synthetic construct
  misc_feature 1..3147: note = variant of P450 oxidase from Bacillus megaterium
  source 1..3147: mol_type = other DNA
atgacaattaaggaaatgcctcagcctaagacgtttggagaacttaaaaatttaccgttattaaatacagataaaccggttcaagctttgatgcgtattgcggatgaattaggagaaatctttaaattcgaggcgcctggtagcgtaacgcgctatttatcaagtcagcgtctaattaaagaagcatgcgatgaatcacgctttgataaaaacttaagtcaagggcttaaatttgcacgtgattttgttggagacgggctggttacaagctggacgcatgaaccgaattggaaaaaagcgcataatatcttagttccaagctttagtcagcatgcaatggggcgttatcatgcgatgatggtcgatatcgccgtgcagcttgttcaaaagtgggagcgtctaaatgcagatgagcatattgaagtatcggaagacatgacacgtttaacgcttgatacaattggtctttgcctgtttaactatcgctttaacagcttttaccgagatacgcctcatccatttattgtgagtgtggttcgtgcactggatgaagtaatgaacaagctgcagcgagcaaatccagacgacccagcttatgatgaaaacaagcgccagtgtcaagaagatatcaaggtgatgaacgactatgtagataaaattattgcagatcgcaaagcaaggggtgaacaaagtcatgatttattaacgcagatgctaaacggaaaagatccagaaacgggtgagccgcttgatgacgggaacattcgtcagcaaattattacattcttaattgcgggacaccaaacgacaagtggtcttttatcatttgcgctgtatttcttagtgaaaaatccacgtgtattacaaaaagtagcagaagaagcagcacgagttctagtagatcctgttccaagctacaaacaagtcaaacagcttaaatatgttggcatggtcttaaacgaagcgctgcgcttatggccagtagcgcctatgttttccctatatgcaaaagaagatacggtgcttggaggagaatatcctttaacgaaaggcgacgaagtaatggttctggtgcctcagcttcaccgtgataaaacaatttggggagacgatgtggaggagttccgtccagagcgttttgaaaatccaagtgcgattccgcagcatgcgtttaaaccgtttggaaacggtcagcgtgcgtgtatcggtcagcagttcgctcttcatagtgcaacgctggtacttggtatgatgctaaaacactttgactttgaagatcatacaaactacgagctcgttattaaagaatcgcggacgttaaaacctgaaggctttgtggtaaaagcaaaatcgaaaggcattccgcttggcggtattccttcacctagcactgaacagtctgctaaaaaagtacgcaaaaaggcagaaaacgctcataatacgccgctgcttgtgctatacggttcaaatgcgggaacagctgaaggaacggcgcgtgatttagcagatattgcaatgagcaaaggatttgcaccgcaggtcgcaacgcttgattcacacgccggtaatcttccgcgcgaaggagctgtattaattgtaacggcgtcttataacggtcatccgcctgataacgcaaagcaatttgtcgattggttagaccaagcgtctgcggatgaagtaaaaggcgttcgctactccgtatttggatgcggcgataaaaattgggcggggacgtatcaaaaagtgcctgcttttatcgatgaaacgcttgccgctaaaggggcagaaaacatcgctaagcgcggtgaagcagatgcaagcgacgactttgaaggcgcgtatgaagaatggcgtaggcatatgtggagtgacgtagcagcctactttggtctcgacattgaaaacagtgaagataataaatctactctttcacttcaatttgtcgacagcgcggcggatatgcctcttgcgaaaatgcacggtgcgttttcaacgaacgtcgtagcaagcaaagaacttcaacagcctggcagtgcacgaagcacgcgacatcttgaaattgaacttccaaaagaagcttcttatcaagaaggagatcatttaggtgttattcctcgctattatgaaggaatagtaaaccgtgtaacacagaggttcggcctaagcgcatcacagctgatccgtctggaagcagaagaagaaaaattagctcatttgccactcgctaaaacagtatccgtagaagagcttctgcaatacgtggagcttcaagatcctgttacgcgcacgcagcttcgcgcaatggctgctaaaacggtctgcccgccgcataaagtagagcttgaagccttgcttggcaagcaagcctacaaagaacaagtgctggcaaaacgtttaacaatgcttgaactgcttgaaaaatacccggcgtgtgaaatgagtttcagcgaatttatcgcccttctgccaagcatacgcccgcgctattactcgatttcttcatcacctcgtgtcgatctgaaacaagcaagcatcacggtcagcgttgtcagcggaccggcgtggagcggatatggagaatataaaggaattgcgtcgaactatcttgctgagctgcaagaaggagatacgattacgtgctttatttccacaccgcagtcagagtttacgctgccaaaagaccctgaaacgccgcttatcatggtcggaccgggaacaggcgtcgcgccgtttagaggctttgtgcaggcgcgcaaacagctaaaagaacaaggacagtcacttggagaagcacatttatacttcggctgccgttcacctcatgaagactatctgtatcaagaagagcttgaaaacgcccaaagcgaaggcatcattctgcttcataccgctttttctcgcatgccgaatcagccgaaaacatacgttcagcacgtaatggaacaagacggcaagaaattgattgaacttcttgatcaaggagcgcacttctatatttgcggagacggaattcaaatggcacctgccgttgaagcaacgcttatgaaaagctatgctgacgttcaccaagtgagtgaagcagacgctcgcttatggctgcagcagctagaagaaaaaggccgatacgcaaaagacgtgtggctgggg

SEQ ID NO: 1212 - protein, 1049 aa, synthetic construct
  REGION 1..1049: note = variant of P450 oxidase from Bacillus megaterium
MTIKEMPQPKTFGELKNLPLLNTDKPVQALMRIADELGEIFKFEAPGSVTRYLSSQRLIKEACDESRFDKNLSQGLKFARDFVGDGLVTSWTHEPNWKKAHNILVPSFSQHAMGRYHAMMVDIAVQLVQKWERLNADEHIEVSEDMTRLTLDTIGLCLFNYRFNSFYRDTPHPFIVSVVRALDEVMNKLQRANPDDPAYDENKRQCQEDIKVMNDYVDKIIADRKARGEQSHDLLTQMLNGKDPETGEPLDDGNIRQQIITFLIAGHQTTSGLLSFALYFLVKNPRVLQKVAEEAARVLVDPVPSYKQVKQLKYVGMVLNEALRLWPVAPMFSLYAKEDTVLGGEYPLTKGDEVMVLVPQLHRDKTIWGDDVEEFRPERFENPSAIPQHAFKPFGNGQRACIGQQFALHSATLVLGMMLKHFDFEDHTNYELVIKESRTLKPEGFVVKAKSKGIPLGGIPSPSTEQSAKKVRKKAENAHNTPLLVLYGSNAGTAEGTARDLADIAMSKGFAPQVATLDSHAGNLPREGAVLIVTASYNGHPPDNAKQFVDWLDQASADEVKGVRYSVFGCGDKNWAGTYQKVPAFIDETLAAKGAENIAKRGEADASDDFEGAYEEWRRHMWSDVAAYFGLDIENSEDNKSTLSLQFVDSAADMPLAKMHGAFSTNVVASKELQQPGSARSTRHLEIELPKEASYQEGDHLGVIPRYYEGIVNRVTQRFGLSASQLIRLEAEEEKLAHLPLAKTVSVEELLQYVELQDPVTRTQLRAMAAKTVCPPHKVELEALLGKQAYKEQVLAKRLTMLELLEKYPACEMSFSEFIALLPSIRPRYYSISSSPRVDLKQASITVSVVSGPAWSGYGEYKGIASNYLAELQEGDTITCFISTPQSEFTLPKDPETPLIMVGPGTGVAPFRGFVQARKQLKEQGQSLGEAHLYFGCRSPHEDYLYQEELENAQSEGIILLHTAFSRMPNQPKTYVQHVMEQDGKKLIELLDQGAHFYICGDGIQMAPAVEATLMKSYADVHQVSEADARLWLQQLEEKGRYAKDVWLG

SEQ ID NO: 1213 - DNA, 3147 bp, synthetic construct
  misc_feature 1..3147: note = variant of P450 oxidase from Bacillus megaterium
  source 1..3147: mol_type = other DNA
atgacaattaaggaaatgcctcagcctaagacgtttggagaacttaaaaatttaccgttattaaatacagataaaccggttcaagctttgatgcgtattgcggatgaattaggagaaatctttaaattcgaggcgcctggtagcgtaacgcgctatttatcaagtcagcgtctaattaaagaagcatgcgatgaatcacgctttgataaaaacttaagtcaagggcttaaatttgcacgtgattttgttggagacgggctggttacaagctggacgcatgaaccgaattggaaaaaagcgcataatatcttagttccaagctttagtcagcatgcaatggggcgttatcatgcgatgatggtcgatatcgccgtgcagcttgttcaaaagtgggagcgtctaaatgcagatgagcatattgaagtatcggaagacatgacacgtttaacgcttgatacaattggtctttgcctgtttaactatcgctttaacagcttttaccgagatacgcctcatccatttattgtgagtgtggttcgtgcactggatgaagtaatgaacaagctgcagcgagcaaatccagacgacccagcttatgatgaaaacaagcgccagtgtcaagaagatatcaaggtgatgaacgactatgtagataaaattattgcagatcgcaaagcaaggggtgaacaaagtcatgatttattaacgcagatgctaaacggaaaagatccagaaacgggtgagccgcttgatgacgggaacattcgtcagcaaattattacattcttaattgcgggacaccaaacgacaagtggtcttttatcatttgcgctgtatttcttagtgaaaaatccacgtgtattacaaaaagtagcagaagaagcagcacgagttctagtagatcctgttccaagctacaaacaagtcaaacagcttaaatatgttggcatggtcttaaacgaagcgctgcgcttatggccagtagcgcctatgttttccctatatgcaaaagaagatacggtgcttggaggagaatatcctttaacgaaaggcgacgaagtaatggttctggtgcctcagcttcaccgtgataaaacaatttggggagacgatgtggaggagttccgtccagagcgttttgaaaatccaagtgcgattccgcagcatgcgtttaaaccgtttggaaacggtcagcgtgcgtgtatcggtcagcagttcgctcttcatagtgcaacgctggtacttggtatgatgctaaaacactttgactttgaagatcatacaaactacgagctcgttattaaagaatcgcggacgttaaaacctgaaggctttgtggtaaaagcaaaatcgaaaggcattccgcttggcggtattccttcacctagcactgaacagtctgctaaaaaagtacgcaaaaaggcagaaaacgctcataatacgccgctgcttgtgctatacggttcaaatgcgggaacagctgaaggaacggcgcgtgatttagcagatattgcaatgagcaaaggatttgcaccgcaggtcgcaacgcttgattcacacgccggtaatcttccgcgcgaaggagctgtattaattgtaacggcgtcttataacggtcatccgcctgataacgcaaagcaatttgtcgattggttagaccaagcgtctgcggatgaagtaaaaggcgttcgctactccgtatttggatgcggcgataaaaattgggcggggacgtatcaaaaagtgcctgcttttatcgatgaaacgcttgccgctaaaggggcagaaaacatcgctaagcgcggtgaagcagatgcaagcgacgactttgaaggcgcgtatgaagaatggcgtgatcatatgtggagtgacgtagcagcctactttggtctcgacattgaaaacagtgaagataataaatctactctttcacttcaatttgtcgacagcgcggcgcggatgcctcttgcgaaaatgcacggtgcgttttcaacgaacgtcgtagcaagcaaagaacttcaacagcctggcagtgcacgaagcacgcgacatcttgaaattgaacttccaaaagaagcttcttatcaagaaggagatcatttaggtgttattcctcgctattatgaaggaatagtaaaccgtgtaacacagaggttcggcctaagcgcatcacagctgatccgtctggaagcagaagaagaaaaattagctcatttgccactcgctaaaacagtatccgtagaagagcttctgcaatacgtggagcttcaagatcctgttacgcgcacgcagcttcgcgcaatggctgctaaaacggtctgcccgccgcataaagtagagcttgaagccttgcttggcaagcaagcctacaaagaacaagtgctggcaaaacgtttaacaatgcttgaactgcttgaaaaatacccggcgtgtgaaatgagtttcagcgaatttatcgcccttctgccaagcatacgcccgcgctattactcgatttcttcatcacctcgtgtcgatctgaaacaagcaagcatcacggtcagcgttgtcagcggaccggcgtggagcggatatggagaatataaaggaattgcgtcgaactatcttgctgagctgcaagaaggagatacgattacgtgctttatttccacaccgcagtcagagtttacgctgccaaaagaccctgaaacgccgcttatcatggtcggaccgggaacaggcgtcgcgccgtttagaggctttgtgcaggcgcgcaaacagctaaaagaacaaggacagtcacttggagaagcacatttatacttcggctgccgttcacctcatgaagactatctgtatcaagaagagcttgaaaacgcccaaagcgaaggcatcattctgcttcataccgctttttctcgcatgccgaatcagccgaaaacatacgttcagcacgtaatggaacaagacggcaagaaattgattgaacttcttgatcaaggagcgcacttctatatttgcggagacggaattcaaatggcacctgccgttgaagcaacgcttatgaaaagctatgctgacgttcaccaagtgagtgaagcagacgctcgcttatggctgcagcagctagaagaaaaaggccgatacgcaaaagacgtgtggctgggg

SEQ ID NO: 1214 - protein, 1049 aa, synthetic construct
  REGION 1..1049: note = variant of P450 oxidase from Bacillus megaterium
MTIKEMPQPKTFGELKNLPLLNTDKPVQALMRIADELGEIFKFEAPGSVTRYLSSQRLIKEACDESRFDKNLSQGLKFARDFVGDGLVTSWTHEPNWKKAHNILVPSFSQHAMGRYHAMMVDIAVQLVQKWERLNADEHIEVSEDMTRLTLDTIGLCLFNYRFNSFYRDTPHPFIVSVVRALDEVMNKLQRANPDDPAYDENKRQCQEDIKVMNDYVDKIIADRKARGEQSHDLLTQMLNGKDPETGEPLDDGNIRQQIITFLIAGHQTTSGLLSFALYFLVKNPRVLQKVAEEAARVLVDPVPSYKQVKQLKYVGMVLNEALRLWPVAPMFSLYAKEDTVLGGEYPLTKGDEVMVLVPQLHRDKTIWGDDVEEFRPERFENPSAIPQHAFKPFGNGQRACIGQQFALHSATLVLGMMLKHFDFEDHTNYELVIKESRTLKPEGFVVKAKSKGIPLGGIPSPSTEQSAKKVRKKAENAHNTPLLVLYGSNAGTAEGTARDLADIAMSKGFAPQVATLDSHAGNLPREGAVLIVTASYNGHPPDNAKQFVDWLDQASADEVKGVRYSVFGCGDKNWAGTYQKVPAFIDETLAAKGAENIAKRGEADASDDFEGAYEEWRDHMWSDVAAYFGLDIENSEDNKSTLSLQFVDSAARMPLAKMHGAFSTNVVASKELQQPGSARSTRHLEIELPKEASYQEGDHLGVIPRYYEGIVNRVTQRFGLSASQLIRLEAEEEKLAHLPLAKTVSVEELLQYVELQDPVTRTQLRAMAAKTVCPPHKVELEALLGKQAYKEQVLAKRLTMLELLEKYPACEMSFSEFIALLPSIRPRYYSISSSPRVDLKQASITVSVVSGPAWSGYGEYKGIASNYLAELQEGDTITCFISTPQSEFTLPKDPETPLIMVGPGTGVAPFRGFVQARKQLKEQGQSLGEAHLYFGCRSPHEDYLYQEELENAQSEGIILLHTAFSRMPNQPKTYVQHVMEQDGKKLIELLDQGAHFYICGDGIQMAPAVEATLMKSYADVHQVSEADARLWLQQLEEKGRYAKDVWLG

SEQ ID NO: 1215 - DNA, 3147 bp, synthetic construct
  misc_feature 1..3147: note = variant of P450 oxidase from Bacillus megaterium
  source 1..3147: mol_type = other DNA
atgacaattaaggaaatgcctcagcctaagacgtttggagaacttaaaaatttaccgttattaaatacagataaaccggttcaagctttgatgcgtattgcggatgaattaggagaaatctttaaattcgaggcgcctggtagcgtaacgcgctatttatcaagtcagcgtctaattaaagaagcatgcgatgaatcacgctttgataaaaacttaagtcaagggcttaaatttgcacgtgattttgttggagacgggctggttacaagctggacgcatgaaccgaattggaaaaaagcgcataatatcttagttccaagctttagtcagcatgcaatggggcgttatcatgcgatgatggtcgatatcgccgtgcagcttgttcaaaagtgggagcgtctaaatgcagatgagcatattgaagtatcggaagacatgacacgtttaacgcttgatacaattggtctttgcctgtttaactatcgctttaacagcttttaccgagatacgcctcatccatttattgtgagtgtggttcgtgcactggatgaagtaatgaacaagctgcagcgagcaaatccagacgacccagcttatgatgaaaacaagcgccagtgtcaagaagatatcaaggtgatgaacgactatgtagataaaattattgcagatcgcaaagcaaggggtgaacaaagtcatgatttattaacgcagatgctaaacggaaaagatccagaaacgggtgagccgcttgatgacgggaacattcgtcagcaaattattacattcttaattgcgggacaccaaacgacaagtggtcttttatcatttgcgctgtatttcttagtgaaaaatccacgtgtattacaaaaagtagcagaagaagcagcacgagttctagtagatcctgttccaagctacaaacaagtcaaacagcttaaatatgttggcatggtcttaaacgaagcgctgcgcttatggccagtagcgcctatgttttccctatatgcaaaagaagatacggtgcttggaggagaatatcctttaacgaaaggcgacgaagtaatggttctggtgcctcagcttcaccgtgataaaacaatttggggagacgatgtggaggagttccgtccagagcgttttgaaaatccaagtgcgattccgcagcatgcgtttaaaccgtttggaaacggtcagcgtgcgtgtatcggtcagcagttcgctcttcatagtgcaacgctggtacttggtatgatgctaaaacactttgactttgaagatcatacaaactacgagctcgttattaaagaatcgcggacgttaaaacctgaaggctttgtggtaaaagcaaaatcgaaaggcattccgcttggcggtattccttcacctagcactgaacagtctgctaaaaaagtacgcaaaaaggcagaaaacgctcataatacgccgctgcttgtgctatacggttcaaatgcgggaacagctgaaggaacggcgcgtgatttagcagatattgcaatgagcaaaggatttgcaccgcaggtcgcaacgcttgattcacacgccggtaatcttccgcgcgaaggagctgtattaattgtaacggcgtcttataacggtcatccgcctgataacgcaaagcaatttgtcgattggttagaccaagcgtctgcggatgaagtaaaaggcgttcgctactccgtatttggatgcggcgataaaaattgggcggggacgtatcaaaaagtgcctgcttttatcgatgaaacgcttgccgctaaaggggcagaaaacatcgctaagcgcggtgaagcagatgcaagcgacgactttgaaggcgcgtatgaagaatggcgtgatcatatgtggcctgacgtagcagcctactttggtctcgacattgaaaacagtgaagataataaatctactctttcacttcaatttgtcgacagcgcggcggatatgcctcttgcgaaaatgcacggtgcgttttcaacgaacgtcgtagcaagcaaagaacttcaacagcctggcagtgcacgaagcacgcgacatcttgaaattgaacttccaaaagaagcttcttatcaagaaggagatcatttaggtgttattcctcgctattatgaaggaatagtaaaccgtgtaacacagaggttcggcctaagcgcatcacagctgatccgtctggaagcagaagaagaaaaattagctcatttgccactcgctaaaacagtatccgtagaagagcttctgcaatacgtggagcttcaagatcctgttacgcgcacgcagcttcgcgcaatggctgctaaaacggtctgcccgccgcataaagtagagcttgaagccttgcttggcaagcaagcctacaaagaacaagtgctggcaaaacgtttaacaatgcttgaactgcttgaaaaatacccggcgtgtgaaatgagtttcagcgaatttatcgcccttctgccaagcatacgcccgcgctattactcgatttcttcatcacctcgtgtcgatctgaaacaagcaagcatcacggtcagcgttgtcagcggaccggcgtggagcggatatggagaatataaaggaattgcgtcgaactatcttgctgagctgcaagaaggagatacgattacgtgctttatttccacaccgcagtcagagtttacgctgccaaaagaccctgaaacgccgcttatcatggtcggaccgggaacaggcgtcgcgccgtttagaggctttgtgcaggcgcgcaaacagctaaaagaacaaggacagtcacttggagaagcacatttatacttcggctgccgttcacctcatgaagactatctgtatcaagaagagcttgaaaacgcccaaagcgaaggcatcattctgcttcataccgctttttctcgcatgccgaatcagccgaaaacatacgttcagcacgtaatggaacaagacggcaagaaattgattgaacttcttgatcaaggagcgcacttctatatttgcggagacggaattcaaatggcacctgccgttgaagcaacgcttatgaaaagctatgctgacgttcaccaagtgagtgaagcagacgctcgcttatggctgcagcagctagaagaaaaaggccgatacgcaaaagacgtgtggctgggg

SEQ ID NO: 1216 - protein, 1049 aa, synthetic construct
  REGION 1..1049: note = variant of P450 oxidase from Bacillus megaterium
MTIKEMPQPKTFGELKNLPLLNTDKPVQALMRIADELGEIFKFEAPGSVTRYLSSQRLIKEACDESRFDKNLSQGLKFARDFVGDGLVTSWTHEPNWKKAHNILVPSFSQHAMGRYHAMMVDIAVQLVQKWERLNADEHIEVSEDMTRLTLDTIGLCLFNYRFNSFYRDTPHPFIVSVVRALDEVMNKLQRANPDDPAYDENKRQCQEDIKVMNDYVDKIIADRKARGEQSHDLLTQMLNGKDPETGEPLDDGNIRQQIITFLIAGHQTTSGLLSFALYFLVKNPRVLQKVAEEAARVLVDPVPSYKQVKQLKYVGMVLNEALRLWPVAPMFSLYAKEDTVLGGEYPLTKGDEVMVLVPQLHRDKTIWGDDVEEFRPERFENPSAIPQHAFKPFGNGQRACIGQQFALHSATLVLGMMLKHFDFEDHTNYELVIKESRTLKPEGFVVKAKSKGIPLGGIPSPSTEQSAKKVRKKAENAHNTPLLVLYGSNAGTAEGTARDLADIAMSKGFAPQVATLDSHAGNLPREGAVLIVTASYNGHPPDNAKQFVDWLDQASADEVKGVRYSVFGCGDKNWAGTYQKVPAFIDETLAAKGAENIAKRGEADASDDFEGAYEEWRDHMWPDVAAYFGLDIENSEDNKSTLSLQFVDSAADMPLAKMHGAFSTNVVASKELQQPGSARSTRHLEIELPKEASYQEGDHLGVIPRYYEGIVNRVTQRFGLSASQLIRLEAEEEKLAHLPLAKTVSVEELLQYVELQDPVTRTQLRAMAAKTVCPPHKVELEALLGKQAYKEQVLAKRLTMLELLEKYPACEMSFSEFIALLPSIRPRYYSISSSPRVDLKQASITVSVVSGPAWSGYGEYKGIASNYLAELQEGDTITCFISTPQSEFTLPKDPETPLIMVGPGTGVAPFRGFVQARKQLKEQGQSLGEAHLYFGCRSPHEDYLYQEELENAQSEGIILLHTAFSRMPNQPKTYVQHVMEQDGKKLIELLDQGAHFYICGDGIQMAPAVEATLMKSYADVHQVSEADARLWLQQLEEKGRYAKDVWLG

SEQ ID NO: 1217 - DNA, 3147 bp, synthetic construct
  misc_feature 1..3147: note = variant of P450 oxidase from Bacillus megaterium
  source 1..3147: mol_type = other DNA
atgacaattaaggaaatgcctcagcctaagacgtttggagaacttaaaaatttaccgttattaaatacagataaaccggttcaagctttgatgcgtattgcggatgaattaggagaaatctttaaattcgaggcgcctggtagcgtaacgcgctatttatcaagtcagcgtctaattaaagaagcatgcgatgaatcacgctttgataaaaacttaagtcaagggcttaaatttgcacgtgattttgttggagacgggctggttacaagctggacgcatgaaccgaattggaaaaaagcgcataatatcttagttccaagctttagtcagcatgcaatggggcgttatcatgcgatgatggtcgatatcgccgtgcagcttgttcaaaagtgggagcgtctaaatgcagatgagcatattgaagtatcggaagacatgacacgtttaacgcttgatacaattggtctttgcctgtttaactatcgctttaacagcttttaccgagatacgcctcatccatttattgtgagtgtggttcgtgcactggatgaagtaatgaacaagctgcagcgagcaaatccagacgacccagcttatgatgaaaacaagcgccagtgtcaagaagatatcaaggtgatgaacgactatgtagataaaattattgcagatcgcaaagcaaggggtgaacaaagtcatgatttattaacgcagatgctaaacggaaaagatccagaaacgggtgagccgcttgatgacgggaacattcgtcagcaaattattacattcttaattgcgggacaccaaacgacaagtggtcttttatcatttgcgctgtatttcttagtgaaaaatccacgtgtattacaaaaagtagcagaagaagcagcacgagttctagtagatcctgttccaagctacaaacaagtcaaacagcttaaatatgttggcatggtcttaaacgaagcgctgcgcttatggccagtagcgcctatgttttccctatatgcaaaagaagatacggtgcttggaggagaatatcctttaacgaaaggcgacgaagtaatggttctggtgcctcagcttcaccgtgataaaacaatttggggagacgatgtggaggagttccgtccagagcgttttgaaaatccaagtgcgattccgcagcatgcgtttaaaccgtttggaaacggtcagcgtgcgtgtatcggtcagcagttcgctcttcatagtgcaacgctggtacttggtatgatgctaaaacactttgactttgaagatcatacaaactacgagctcgttattaaagaatcgcggacgttaaaacctgaaggctttgtggtaaaagcaaaatcgaaaggcattccgcttggcggtattccttcacctagcactgaacagtctgctaaaaaagtacgcaaaaaggcagaaaacgctcataatacgccgctgcttgtgctatacggttcaaatgcgggaacagctgaaggaacggcgcgtgatttagcagatattgcaatgagcaaaggatttgcaccgcaggtcgcaacgcttgattcacacgccggtaatcttccgcgcgaaggagctgtattaattgtaacggcgtcttataacggtcatccgcctgataacgcaaagcaatttgtcgattggttagaccaagcgtctgcggatgaagtaaaaggcgttcgctactccgtatttggatgcggcgataaaaattgggcggggacgtatcaaaaagtgcctgcttttatcgatgaaacgcttgccgctaaaggggcagaaaacatcgctaagcgcggtgaagcagatgcaagcgacgactttgaaggcgcgtatgaagaatggcgtgatcatatgtggagtgacgtagcagccagttttggtctcgacattgaaaacagtgaagataataaatctactctttcacttcaatttgtcgacagcgcggcggatatgcctcttgcgaaaatgcacggtgcgttttcaacgaacgtcgtagcaagcaaagaacttcaacagcctggcagtgcacgaagcacgcgacatcttgaaattgaacttccaaaagaagcttcttatcaagaaggagatcatttaggtgttattcctcgctattatgaaggaatagtaaaccgtgtaacacagaggttcggcctaagcgcatcacagctgatccgtctggaagcagaagaagaaaaattagctcatttgccactcgctaaaacagtatccgtagaagagcttctgcaatacgtggagcttcaagatcctgttacgcgcacgcagcttcgcgcaatggctgctaaaacggtctgcccgccgcataaagtagagcttgaagccttgcttggcaagcaagcctacaaagaacaagtgctggcaaaacgtttaacaatgcttgaactgcttgaaaaatacccggcgtgtgaaatgagtttcagcgaatttatcgcccttctgccaagcatacgcccgcgctattactcgatttcttcatcacctcgtgtcgatctgaaacaagcaagcatcacggtcagcgttgtcagcggaccggcgtggagcggatatggagaatataaaggaattgcgtcgaactatcttgctgagctgcaagaaggagatacgattacgtgctttatttccacaccgcagtcagagtttacgctgccaaaagaccctgaaacgccgcttatcatggtcggaccgggaacaggcgtcgcgccgtttagaggctttgtgcaggcgcgcaaacagctaaaagaacaaggacagtcacttggagaagcacatttatacttcggctgccgttcacctcatgaagactatctgtatcaagaagagcttgaaaacgcccaaagcgaaggcatcattctgcttcataccgctttttctcgcatgccgaatcagccgaaaacatacgttcagcacgtaatggaacaagacggcaagaaattgattgaacttcttgatcaaggagcgcacttctatatttgcggagacggaattcaaatggcacctgccgttgaagcaacgcttatgaaaagctatgctgacgttcaccaagtgagtgaagcagacgctcgcttatggctgcagcagctagaagaaaaaggccgatacgcaaaagacgtgtggctgggg

SEQ ID NO: 1218 - protein, 1049 aa, synthetic construct
  REGION 1..1049: note = variant of P450 oxidase from Bacillus megaterium
MTIKEMPQPKTFGELKNLPLLNTDKPVQALMRIADELGEIFKFEAPGSVTRYLSSQRLIKEACDESRFDKNLSQGLKFARDFVGDGLVTSWTHEPNWKKAHNILVPSFSQHAMGRYHAMMVDIAVQLVQKWERLNADEHIEVSEDMTRLTLDTIGLCLFNYRFNSFYRDTPHPFIVSVVRALDEVMNKLQRANPDDPAYDENKRQCQEDIKVMNDYVDKIIADRKARGEQSHDLLTQMLNGKDPETGEPLDDGNIRQQIITFLIAGHQTTSGLLSFALYFLVKNPRVLQKVAEEAARVLVDPVPSYKQVKQLKYVGMVLNEALRLWPVAPMFSLYAKEDTVLGGEYPLTKGDEVMVLVPQLHRDKTIWGDDVEEFRPERFENPSAIPQHAFKPFGNGQRACIGQQFALHSATLVLGMMLKHFDFEDHTNYELVIKESRTLKPEGFVVKAKSKGIPLGGIPSPSTEQSAKKVRKKAENAHNTPLLVLYGSNAGTAEGTARDLADIAMSKGFAPQVATLDSHAGNLPREGAVLIVTASYNGHPPDNAKQFVDWLDQASADEVKGVRYSVFGCGDKNWAGTYQKVPAFIDETLAAKGAENIAKRGEADASDDFEGAYEEWRDHMWSDVAASFGLDIENSEDNKSTLSLQFVDSAADMPLAKMHGAFSTNVVASKELQQPGSARSTRHLEIELPKEASYQEGDHLGVIPRYYEGIVNRVTQRFGLSASQLIRLEAEEEKLAHLPLAKTVSVEELLQYVELQDPVTRTQLRAMAAKTVCPPHKVELEALLGKQAYKEQVLAKRLTMLELLEKYPACEMSFSEFIALLPSIRPRYYSISSSPRVDLKQASITVSVVSGPAWSGYGEYKGIASNYLAELQEGDTITCFISTPQSEFTLPKDPETPLIMVGPGTGVAPFRGFVQARKQLKEQGQSLGEAHLYFGCRSPHEDYLYQEELENAQSEGIILLHTAFSRMPNQPKTYVQHVMEQDGKKLIELLDQGAHFYICGDGIQMAPAVEATLMKSYADVHQVSEADARLWLQQLEEKGRYAKDVWLG

SEQ ID NO: 1219 - DNA, 3147 bp, synthetic construct
  misc_feature 1..3147: note = variant of P450 oxidase from Bacillus megaterium
  source 1..3147: mol_type = other DNA
atgacaattaaggaaatgcctcagcctaagacgtttggagaacttaaaaatttaccgttattaaatacagataaaccggttcaagctttgatgcgtattgcggatgaattaggagaaatctttaaattcgaggcgcctggtagcgtaacgcgctatttatcaagtcagcgtctaattaaagaagcatgcgatgaatcacgctttgataaaaacttaagtcaagggcttaaatttgcacgtgattttgttggagacgggctggttacaagctggacgcatgaaccgaattggaaaaaagcgcataatatcttagttccaagctttagtcagcatgcaatggggcgttatcatgcgatgatggtcgatatcgccgtgcagcttgttcaaaagtgggagcgtctaaatgcagatgagcatattgaagtatcggaagacatgacacgtttaacgcttgatacaattggtctttgcctgtttaactatcgctttaacagcttttaccgagatacgcctcatccatttattgtgagtgtggttcgtgcactggatgaagtaatgaacaagctgcagcgagcaaatccagacgacccagcttatgatgaaaacaagcgccagtgtcaagaagatatcaaggtgatgaacgactatgtagataaaattattgcagatcgcaaagcaaggggtgaacaaagtcatgatttattaacgcagatgctaaacggaaaagatccagaaacgggtgagccgcttgatgacgggaacattcgtcagcaaattattacattcttaattgcgggacaccaaacgacaagtggtcttttatcatttgcgctgtatttcttagtgaaaaatccacgtgtattacaaaaagtagcagaagaagcagcacgagttctagtagatcctgttccaagctacaaacaagtcaaacagcttaaatatgttggcatggtcttaaacgaagcgctgcgcttatggccagtagcgcctatgttttccctatatgcaaaagaagatacggtgcttggaggagaatatcctttaacgaaaggcgacgaagtaatggttctggtgcctcagcttcaccgtgataaaacaatttggggagacgatgtggaggagttccgtccagagcgttttgaaaatccaagtgcgattccgcagcatgcgtttaaaccgtttggaaacggtcagcgtgcgtgtatcggtcagcagttcgctcttcatagtgcaacgctggtacttggtatgatgctaaaacactttgactttgaagatcatacaaactacgagctcgttattaaagaatcgcggacgttaaaacctgaaggctttgtggtaaaagcaaaatcgaaaggcattccgcttggcggtattccttcacctagcactgaacagtctgctaaaaaagtacgcaaaaaggcagaaaacgctcataatacgccgctgcttgtgctatacggttcaaatgcgggaacagctgaaggaacggcgcgtgatttagcagatattgcaatgagcaaaggatttgcaccgcaggtcgcaacgcttgatctgcacgccggtaatcttccgcgcgaaggagctgtattaattgtaacggcgtcttataacggtcatccgcctgataacgcaaagcaatttgtcgattggttagaccaagcgtctgcggatgaagtaaaaggcgttcgctactccgtatttggatgcggcgataaaaattgggcggggacgtatcaaaaagtgcctgcttttatcgatgaaacgcttgccgctaaaggggcagaaaacatcgctaagcgcggtgaagcagatgcaagcgacgactttgaaggcgcgtatgaagaatggcgtgatcatatgtggagtgacgtagcagcctactttggtctcgacattgaaaacagtgaagataataaatctactctttcacttcaatttgtcgacagcgcggcggatatgcctcttgcgaaaatgcacggtgcgttttcaacgaacgtcgtagcaagcaaagaacttcaacagcctggcagtgcacgaagcacgcgacatcttgaaattgaacttccaaaagaagcttcttatcaagaaggagatcatttaggtgttattcctcgctattatgaaggaatagtaaaccgtgtaacacagaggttcggcctaagcgcatcacagctgatccgtctggaagcagaagaagaaaaattagctcatttgccactcgctaaaacagtatccgtagaagagcttctgcaatacgtggagcttcaagatcctgttacgcgcacgcagcttcgcgcaatggctgctaaaacggtctgcccgccgcataaagtagagcttgaagccttgcttggcaagcaagcctacaaagaacaagtgctggcaaaacgtttaacaatgcttgaactgcttgaaaaatacccggcgtgtgaaatgagtttcagcgaatttatcgcccttctgccaagcatacgcccgcgctattactcgatttcttcatcacctcgtgtcgatctgaaacaagcaagcatcacggtcagcgttgtcagcggaccggcgtggagcggatatggagaatataaaggaattgcgtcgaactatcttgctgagctgcaagaaggagatacgattacgtgctttatttccacaccgcagtcagagtttacgctgccaaaagaccctgaaacgccgcttatcatggtcggaccgggaacaggcgtcgcgccgtttagaggctttgtgcaggcgcgcaaacagctaaaagaacaaggacagtcacttggagaagcacatttatacttcggctgccgttcacctcatgaagactatctgtatcaagaagagcttgaaaacgcccaaagcgaaggcatcattctgcttcataccgctttttctcgcatgccgaatcagccgaaaacatacgttcagcacgtaatggaacaagacggcaagaaattgattgaacttcttgatcaaggagcgcacttctatatttgcggagacggaattcaaatggcacctgccgttgaagcaacgcttatgaaaagctatgctgacgttcaccaagtgagtgaagcagacgctcgcttatggctgcagcagctagaagaaaaaggccgatacgcaaaagacgtgtggctgggg

SEQ ID NO: 1220 - protein, 1049 aa, synthetic construct
  REGION 1..1049: note = variant of P450 oxidase from Bacillus megaterium
MTIKEMPQPKTFGELKNLPLLNTDKPVQALMRIADELGEIFKFEAPGSVTRYLSSQRLIKEACDESRFDKNLSQGLKFARDFVGDGLVTSWTHEPNWKKAHNILVPSFSQHAMGRYHAMMVDIAVQLVQKWERLNADEHIEVSEDMTRLTLDTIGLCLFNYRFNSFYRDTPHPFIVSVVRALDEVMNKLQRANPDDPAYDENKRQCQEDIKVMNDYVDKIIADRKARGEQSHDLLTQMLNGKDPETGEPLDDGNIRQQIITFLIAGHQTTSGLLSFALYFLVKNPRVLQKVAEEAARVLVDPVPSYKQVKQLKYVGMVLNEALRLWPVAPMFSLYAKEDTVLGGEYPLTKGDEVMVLVPQLHRDKTIWGDDVEEFRPERFENPSAIPQHAFKPFGNGQRACIGQQFALHSATLVLGMMLKHFDFEDHTNYELVIKESRTLKPEGFVVKAKSKGIPLGGIPSPSTEQSAKKVRKKAENAHNTPLLVLYGSNAGTAEGTARDLADIAMSKGFAPQVATLDLHAGNLPREGAVLIVTASYNGHPPDNAKQFVDWLDQASADEVKGVRYSVFGCGDKNWAGTYQKVPAFIDETLAAKGAENIAKRGEADASDDFEGAYEEWRDHMWSDVAAYFGLDIENSEDNKSTLSLQFVDSAADMPLAKMHGAFSTNVVASKELQQPGSARSTRHLEIELPKEASYQEGDHLGVIPRYYEGIVNRVTQRFGLSASQLIRLEAEEEKLAHLPLAKTVSVEELLQYVELQDPVTRTQLRAMAAKTVCPPHKVELEALLGKQAYKEQVLAKRLTMLELLEKYPACEMSFSEFIALLPSIRPRYYSISSSPRVDLKQASITVSVVSGPAWSGYGEYKGIASNYLAELQEGDTITCFISTPQSEFTLPKDPETPLIMVGPGTGVAPFRGFVQARKQLKEQGQSLGEAHLYFGCRSPHEDYLYQEELENAQSEGIILLHTAFSRMPNQPKTYVQHVMEQDGKKLIELLDQGAHFYICGDGIQMAPAVEATLMKSYADVHQVSEADARLWLQQLEEKGRYAKDVWLG

SEQ ID NO: 1221 - DNA, 3147 bp, synthetic construct
  misc_feature 1..3147: note = variant of P450 oxidase from Bacillus megaterium
  source 1..3147: mol_type = other DNA
atgacaattaaggaaatgcctcagcctaagacgtttggagaacttaaaaatttaccgttattaaatacagataaaccggttcaagctttgatgcgtattgcggatgaattaggagaaatctttaaattcgaggcgcctggtagcgtaacgcgctatttatcaagtcagcgtctaattaaagaagcatgcgatgaatcacgctttgataaaaacttaagtcaagggcttaaatttgcacgtgattttgttggagacgggctggttacaagctggacgcatgaaccgaattggaaaaaagcgcataatatcttagttccaagctttagtcagcatgcaatggggcgttatcatgcgatgatggtcgatatcgccgtgcagcttgttcaaaagtgggagcgtctaaatgcagatgagcatattgaagtatcggaagacatgacacgtttaacgcttgatacaattggtctttgcctgtttaactatcgctttaacagcttttaccgagatacgcctcatccatttattgtgagtgtggttcgtgcactggatgaagtaatgaacaagctgcagcgagcaaatccagacgacccagcttatgatgaaaacaagcgccagtgtcaagaagatatcaaggtgatgaacgactatgtagataaaattattgcagatcgcaaagcaaggggtgaacaaagtcatgatttattaacgcagatgctaaacggaaaagatccagaaacgggtgagccgcttgatgacgggaacattcgtcagcaaattattacattcttaattgcgggacaccaaacgacaagtggtcttttatcatttgcgctgtatttcttagtgaaaaatccacgtgtattacaaaaagtagcagaagaagcagcacgagttctagtagatcctgttccaagctacaaacaagtcaaacagcttaaatatgttggcatggtcttaaacgaagcgctgcgcttatggccagtagcgcctatgttttccctatatgcaaaagaagatacggtgcttggaggagaatatcctttaacgaaaggcgacgaagtaatggttctggtgcctcagcttcaccgtgataaaacaatttggggagacgatgtggaggagttccgtccagagcgttttgaaaatccaagtgcgattccgcagcatgcgtttaaaccgtttggaaacggtcagcgtgcgtgtatcggtcagcagttcgctcttcatagtgcaacgctggtacttggtatgatgctaaaacactttgactttgaagatcatacaaactacgagctcgttattaaagaatcgcggacgttaaaacctgaaggctttgtggtaaaagcaaaatcgaaaggcattccgcttggcggtattccttcacctagcactgaacagtctgctaaaaaagtacgcaaaaaggcagaaaacgctcataatacgccgctgcttgtgctatacggttcaaatgcgggaacagctgaaggaacggcgcgtgatttagcagatattgcaatgagcaaaggatttgcaccgcaggtcgcaacgcttgattcacacgccggtaatcttccgcgcgaaggagctgtattaattgtaacggcgtcttataacggtcatccgcctgataacgcaaagcaatttgtcgattggttagaccaagcgtctgcggatgaagtaaaaggcgttcgctactccgtatttggatgcggcgataaaaattgggcggggacgtatcaaaaagtgcctgcttttatcgatgaaacgcttgccgctaaaggggcagaaaacatcgctaagcgcggtgaagcagatgcaagcgacgactttgaaggcgcgtatgaagaatggctggatcatatgtggagtgacgtagcagcctactttggtctcgacattgaaaacagtgaagataataaatctactctttcacttcaatttgtcgacagcgcggcggatatgcctcttgcgaaaatgcacggtgcgttttcaacgaacgtcgtagcaagcaaagaacttcaacagcctggcagtgcacgaagcacgcgacatcttgaaattgaacttccaaaagaagcttcttatcaagaaggagatcatttaggtgttattcctcgctattatgaaggaatagtaaaccgtgtaacacagaggttcggcctaagcgcatcacagctgatccgtctggaagcagaagaagaaaaattagctcatttgccactcgctaaaacagtatccgtagaagagcttctgcaatacgtggagcttcaagatcctgttacgcgcacgcagcttcgcgcaatggctgctaaaacggtctgcccgccgcataaagtagagcttgaagccttgcttggcaagcaagcctacaaagaacaagtgctggcaaaacgtttaacaatgcttgaactgcttgaaaaatacccggcgtgtgaaatgagtttcagcgaatttatcgcccttctgccaagcatacgcccgcgctattactcgatttcttcatcacctcgtgtcgatctgaaacaagcaagcatcacggtcagcgttgtcagcggaccggcgtggagcggatatggagaatataaaggaattgcgtcgaactatcttgctgagctgcaagaaggagatacgattacgtgctttatttccacaccgcagtcagagtttacgctgccaaaagaccctgaaacgccgcttatcatggtcggaccgggaacaggcgtcgcgccgtttagaggctttgtgcaggcgcgcaaacagctaaaagaacaaggacagtcacttggagaagcacatttatacttcggctgccgttcacctcatgaagactatctgtatcaagaagagcttgaaaacgcccaaagcgaaggcatcattctgcttcataccgctttttctcgcatgccgaatcagccgaaaacatacgttcagcacgtaatggaacaagacggcaagaaattgattgaacttcttgatcaaggagcgcacttctatatttgcggagacggaattcaaatggcacctgccgttgaagcaacgcttatgaaaagctatgctgacgttcaccaagtgagtgaagcagacgctcgcttatggctgcagcagctagaagaaaaaggccgatacgcaaaagacgtgtggctgggg

SEQ ID NO: 1222 - protein, 1049 aa, synthetic construct
  REGION 1..1049: note = variant of P450 oxidase from Bacillus megaterium
MTIKEMPQPKTFGELKNLPLLNTDKPVQALMRIADELGEIFKFEAPGSVTRYLSSQRLIKEACDESRFDKNLSQGLKFARDFVGDGLVTSWTHEPNWKKAHNILVPSFSQHAMGRYHAMMVDIAVQLVQKWERLNADEHIEVSEDMTRLTLDTIGLCLFNYRFNSFYRDTPHPFIVSVVRALDEVMNKLQRANPDDPAYDENKRQCQEDIKVMNDYVDKIIADRKARGEQSHDLLTQMLNGKDPETGEPLDDGNIRQQIITFLIAGHQTTSGLLSFALYFLVKNPRVLQKVAEEAARVLVDPVPSYKQVKQLKYVGMVLNEALRLWPVAPMFSLYAKEDTVLGGEYPLTKGDEVMVLVPQLHRDKTIWGDDVEEFRPERFENPSAIPQHAFKPFGNGQRACIGQQFALHSATLVLGMMLKHFDFEDHTNYELVIKESRTLKPEGFVVKAKSKGIPLGGIPSPSTEQSAKKVRKKAENAHNTPLLVLYGSNAGTAEGTARDLADIAMSKGFAPQVATLDSHAGNLPREGAVLIVTASYNGHPPDNAKQFVDWLDQASADEVKGVRYSVFGCGDKNWAGTYQKVPAFIDETLAAKGAENIAKRGEADASDDFEGAYEEWLDHMWSDVAAYFGLDIENSEDNKSTLSLQFVDSAADMPLAKMHGAFSTNVVASKELQQPGSARSTRHLEIELPKEASYQEGDHLGVIPRYYEGIVNRVTQRFGLSASQLIRLEAEEEKLAHLPLAKTVSVEELLQYVELQDPVTRTQLRAMAAKTVCPPHKVELEALLGKQAYKEQVLAKRLTMLELLEKYPACEMSFSEFIALLPSIRPRYYSISSSPRVDLKQASITVSVVSGPAWSGYGEYKGIASNYLAELQEGDTITCFISTPQSEFTLPKDPETPLIMVGPGTGVAPFRGFVQARKQLKEQGQSLGEAHLYFGCRSPHEDYLYQEELENAQSEGIILLHTAFSRMPNQPKTYVQHVMEQDGKKLIELLDQGAHFYICGDGIQMAPAVEATLMKSYADVHQVSEADARLWLQQLEEKGRYAKDVWLG

SEQ ID NO: 1223 - DNA, 3147 bp, synthetic construct
  misc_feature 1..3147: note = variant of P450 oxidase from Bacillus megaterium
  source 1..3147: mol_type = other DNA
atgacaattaaggaaatgcctcagcctaagacgtttggagaacttaaaaatttaccgttattaaatacagataaaccggttcaagctttgatgcgtattgcggatgaattaggagaaatctttaaattcgaggcgcctggtagcgtaacgcgctatttatcaagtcagcgtctaattaaagaagcatgcgatgaatcacgctttgataaaaacttaagtcaagggcttaaatttgcacgtgattttgttggagacgggctggttacaagctggacgcatgaaccgaattggaaaaaagcgcataatatcttagttccaagctttagtcagcatgcaatggggcgttatcatgcgatgatggtcgatatcgccgtgcagcttgttcaaaagtgggagcgtctaaatgcagatgagcatattgaagtatcggaagacatgacacgtttaacgcttgatacaattggtctttgcctgtttaactatcgctttaacagcttttaccgagatacgcctcatccatttattgtgagtgtggttcgtgcactggatgaagtaatgaacaagctgcagcgagcaaatccagacgacccagcttatgatgaaaacaagcgccagtgtcaagaagatatcaaggtgatgaacgactatgtagataaaattattgcagatcgcaaagcaaggggtgaacaaagtcatgatttattaacgcagatgctaaacggaaaagatccagaaacgggtgagccgcttgatgacgggaacattcgtcagcaaattattacattcttaattgcgggacaccaaacgacaagtggtcttttatcatttgcgctgtatttcttagtgaaaaatccacgtgtattacaaaaagtagcagaagaagcagcacgagttctagtagatcctgttccaagctacaaacaagtcaaacagcttaaatatgttggcatggtcttaaacgaagcgctgcgcttatggccagtagcgcctatgttttccctatatgcaaaagaagatacggtgcttggaggagaatatcctttaacgaaaggcgacgaagtaatggttctggtgcctcagcttcaccgtgataaaacaatttggggagacgatgtggaggagttccgtccagagcgttttgaaaatccaagtgcgattccgcagcatgcgtttaaaccgtttggaaacggtcagcgtgcgtgtatcggtcagcagttcgctcttcatagtgcaacgctggtacttggtatgatgctaaaacactttgactttgaagatcatacaaactacgagctcgttattaaagaatcgcggacgttaaaacctgaaggctttgtggtaaaagcaaaatcgaaaggcattccgcttggcggtattccttcacctagcactgaacagtctgctaaaaaagtacgcaaaaaggcagaaaacgctcataatacgccgctgcttgtgctatacggttcaaatgcgggaacagctgaaggaacggcgcgtgatttagcagatattgcaatgagcaaaggatttgcaccgcaggtcgcaacgcttgattcacacgccggtaatcttccgcgcgaaggagctgtattaattgtaacggcgtcttataacggtcatccgcctgataacgcaaagcaatttgtcgattggttagaccaagcgtctgcggatgaagtaaaaggcgttcgctactccgtatttggatgcggcgataaaaattgggcggggacgtatcaaaaagtgcctgcttttatcgatgaaacgcttgccgctaaaggggcagaaaacatcgctaagcgcggtgaagcagatgcaagcgacgactttgaaggcgcgtatgaagaatggggggatcatatgtggagtgacgtagcagcctactttggtctcgacattgaaaacagtgaagataataaatctactctttcacttcaatttgtcgacagcgcggcggatatgcctcttgcgaaaatgcacggtgcgttttcaacgaacgtcgtagcaagcaaagaacttcaacagcctggcagtgcacgaagcacgcgacatcttgaaattgaacttccaaaagaagcttcttatcaagaaggagatcatttaggtgttattcctcgctattatgaaggaatagtaaaccgtgtaacacagaggttcggcctaagcgcatcacagctgatccgtctggaagcagaagaagaaaaattagctcatttgccactcgctaaaacagtatccgtagaagagcttctgcaatacgtggagcttcaagatcctgttacgcgcacgcagcttcgcgcaatggctgctaaaacggtctgcccgccgcataaagtagagcttgaagccttgcttggcaagcaagcctacaaagaacaagtgctggcaaaacgtttaacaatgcttgaactgcttgaaaaatacccggcgtgtgaaatgagtttcagcgaatttatcgcccttctgccaagcatacgcccgcgctattactcgatttcttcatcacctcgtgtcgatctgaaacaagcaagcatcacggtcagcgttgtcagcggaccggcgtggagcggatatggagaatataaaggaattgcgtcgaactatcttgctgagctgcaagaaggagatacgattacgtgctttatttccacaccgcagtcagagtttacgctgccaaaagaccctgaaacgccgcttatcatggtcggaccgggaacaggcgtcgcgccgtttagaggctttgtgcaggcgcgcaaacagctaaaagaacaaggacagtcacttggagaagcacatttatacttcggctgccgttcacctcatgaagactatctgtatcaagaagagcttgaaaacgcccaaagcgaaggcatcattctgcttcataccgctttttctcgcatgccgaatcagccgaaaacatacgttcagcacgtaatggaacaagacggcaagaaattgattgaacttcttgatcaaggagcgcacttctatatttgcggagacggaattcaaatggcacctgccgttgaagcaacgcttatgaaaagctatgctgacgttcaccaagtgagtgaagcagacgctcgcttatggctgcagcagctagaagaaaaaggccgatacgcaaaagacgtgtggctgggg

SEQ ID NO: 1224 - protein, 1049 aa, synthetic construct
  REGION 1..1049: note = variant of P450 oxidase from Bacillus megaterium
MTIKEMPQPKTFGELKNLPLLNTDKPVQALMRIADELGEIFKFEAPGSVTRYLSSQRLIKEACDESRFDKNLSQGLKFARDFVGDGLVTSWTHEPNWKKAHNILVPSFSQHAMGRYHAMMVDIAVQLVQKWERLNADEHIEVSEDMTRLTLDTIGLCLFNYRFNSFYRDTPHPFIVSVVRALDEVMNKLQRANPDDPAYDENKRQCQEDIKVMNDYVDKIIADRKARGEQSHDLLTQMLNGKDPETGEPLDDGNIRQQIITFLIAGHQTTSGLLSFALYFLVKNPRVLQKVAEEAARVLVDPVPSYKQVKQLKYVGMVLNEALRLWPVAPMFSLYAKEDTVLGGEYPLTKGDEVMVLVPQLHRDKTIWGDDVEEFRPERFENPSAIPQHAFKPFGNGQRACIGQQFALHSATLVLGMMLKHFDFEDHTNYELVIKESRTLKPEGFVVKAKSKGIPLGGIPSPSTEQSAKKVRKKAENAHNTPLLVLYGSNAGTAEGTARDLADIAMSKGFAPQVATLDSHAGNLPREGAVLIVTASYNGHPPDNAKQFVDWLDQASADEVKGVRYSVFGCGDKNWAGTYQKVPAFIDETLAAKGAENIAKRGEADASDDFEGAYEEWGDHMWSDVAAYFGLDIENSEDNKSTLSLQFVDSAADMPLAKMHGAFSTNVVASKELQQPGSARSTRHLEIELPKEASYQEGDHLGVIPRYYEGIVNRVTQRFGLSASQLIRLEAEEEKLAHLPLAKTVSVEELLQYVELQDPVTRTQLRAMAAKTVCPPHKVELEALLGKQAYKEQVLAKRLTMLELLEKYPACEMSFSEFIALLPSIRPRYYSISSSPRVDLKQASITVSVVSGPAWSGYGEYKGIASNYLAELQEGDTITCFISTPQSEFTLPKDPETPLIMVGPGTGVAPFRGFVQARKQLKEQGQSLGEAHLYFGCRSPHEDYLYQEELENAQSEGIILLHTAFSRMPNQPKTYVQHVMEQDGKKLIELLDQGAHFYICGDGIQMAPAVEATLMKSYADVHQVSEADARLWLQQLEEKGRYAKDVWLG

SEQ ID NO: 1225 - DNA, 3147 bp, synthetic construct
  misc_feature 1..3147: note = variant of P450 oxidase from Bacillus megaterium
  source 1..3147: mol_type = other DNA
atgacaattaaggaaatgcctcagcctaagacgtttggagaacttaaaaatttaccgttattaaatacagataaaccggttcaagctttgatgcgtattgcggatgaattaggagaaatctttaaattcgaggcgcctggtagcgtaacgcgctatttatcaagtcagcgtctaattaaagaagcatgcgatgaatcacgctttgataaaaacttaagtcaagggcttaaatttgcacgtgattttgttggagacgggctggttacaagctggacgcatgaaccgaattggaaaaaagcgcataatatcttagttccaagctttagtcagcatgcaatggggcgttatcatgcgatgatggtcgatatcgccgtgcagcttgttcaaaagtgggagcgtctaaatgcagatgagcatattgaagtatcggaagacatgacacgtttaacgcttgatacaattggtctttgcctgtttaactatcgctttaacagcttttaccgagatacgcctcatccatttattgtgagtgtggttcgtgcactggatgaagtaatgaacaagctgcagcgagcaaatccagacgacccagcttatgatgaaaacaagcgccagtgtcaagaagatatcaaggtgatgaacgactatgtagataaaattattgcagatcgcaaagcaaggggtgaacaaagtcatgatttattaacgcagatgctaaacggaaaagatccagaaacgggtgagccgcttgatgacgggaacattcgtcagcaaattattacattcttaattgcgggacaccaaacgacaagtggtcttttatcatttgcgctgtatttcttagtgaaaaatccacgtgtattacaaaaagtagcagaagaagcagcacgagttctagtagatcctgttccaagctacaaacaagtcaaacagcttaaatatgttggcatggtcttaaacgaagcgctgcgcttatggccagtagcgcctatgttttccctatatgcaaaagaagatacggtgcttggaggagaatatcctttaacgaaaggcgacgaagtaatggttctggtgcctcagcttcaccgtgataaaacaatttggggagacgatgtggaggagttccgtccagagcgttttgaaaatccaagtgcgattccgcagcatgcgtttaaaccgtttggaaacggtcagcgtgcgtgtatcggtcagcagttcgctcttcatagtgcaacgctggtacttggtatgatgctaaaacactttgactttgaagatcatacaaactacgagctcgttattaaagaatcgcggacgttaaaacctgaaggctttgtggtaaaagcaaaatcgaaaggcattccgcttggcggtattccttcacctagcactgaacagtctgctaaaaaagtacgcaaaaaggcagaaaacgctcataatacgccgctgcttgtgctatacggttcaaatgcgggaacagctgaaggaacggcgcgtgatttagcagatattgcaatgagcaaaggatttgcaccgcaggtcgcaacgcttacgtcacacgccggtaatcttccgcgcgaaggagctgtattaattgtaacggcgtcttataacggtcatccgcctgataacgcaaagcaatttgtcgattggttagaccaagcgtctgcggatgaagtaaaaggcgttcgctactccgtatttggatgcggcgataaaaattgggcggggacgtatcaaaaagtgcctgcttttatcgatgaaacgcttgccgctaaaggggcagaaaacatcgctaagcgcggtgaagcagatgcaagcgacgactttgaaggcgcgtatgaagaatggcgtgatcatatgtggagtgacgtagcagcctactttggtctcgacattgaaaacagtgaagataataaatctactctttcacttcaatttgtcgacagcgcggcggatatgcctcttgcgaaaatgcacggtgcgttttcaacgaacgtcgtagcaagcaaagaacttcaacagcctggcagtgcacgaagcacgcgacatcttgaaattgaacttccaaaagaagcttcttatcaagaaggagatcatttaggtgttattcctcgctattatgaaggaatagtaaaccgtgtaacacagaggttcggcctaagcgcatcacagctgatccgtctggaagcagaagaagaaaaattagctcatttgccactcgctaaaacagtatccgtagaagagcttctgcaatacgtggagcttcaagatcctgttacgcgcacgcagcttcgcgcaatggctgctaaaacggtctgcccgccgcataaagtagagcttgaagccttgcttggcaagcaagcctacaaagaacaagtgctggcaaaacgtttaacaatgcttgaactgcttgaaaaatacccggcgtgtgaaatgagtttcagcgaatttatcgcccttctgccaagcatacgcccgcgctattactcgatttcttcatcacctcgtgtcgatctgaaacaagcaagcatcacggtcagcgttgtcagcggaccggcgtggagcggatatggagaatataaaggaattgcgtcgaactatcttgctgagctgcaagaaggagatacgattacgtgctttatttccacaccgcagtcagagtttacgctgccaaaagaccctgaaacgccgcttatcatggtcggaccgggaacaggcgtcgcgccgtttagaggctttgtgcaggcgcgcaaacagctaaaagaacaaggacagtcacttggagaagcacatttatacttcggctgccgttcacctcatgaagactatctgtatcaagaagagcttgaaaacgcccaaagcgaaggcatcattctgcttcataccgctttttctcgcatgccgaatcagccgaaaacatacgttcagcacgtaatggaacaagacggcaagaaattgattgaacttcttgatcaaggagcgcacttctatatttgcggagacggaattcaaatggcacctgccgttgaagcaacgcttatgaaaagctatgctgacgttcaccaagtgagtgaagcagacgctcgcttatggctgcagcagctagaagaaaaaggccgatacgcaaaagacgtgtggctgggg

SEQ ID NO: 1226 - protein, 1049 aa, synthetic construct
  REGION 1..1049: note = variant of P450 oxidase from Bacillus megaterium
MTIKEMPQPKTFGELKNLPLLNTDKPVQALMRIADELGEIFKFEAPGSVTRYLSSQRLIKEACDESRFDKNLSQGLKFARDFVGDGLVTSWTHEPNWKKAHNILVPSFSQHAMGRYHAMMVDIAVQLVQKWERLNADEHIEVSEDMTRLTLDTIGLCLFNYRFNSFYRDTPHPFIVSVVRALDEVMNKLQRANPDDPAYDENKRQCQEDIKVMNDYVDKIIADRKARGEQSHDLLTQMLNGKDPETGEPLDDGNIRQQIITFLIAGHQTTSGLLSFALYFLVKNPRVLQKVAEEAARVLVDPVPSYKQVKQLKYVGMVLNEALRLWPVAPMFSLYAKEDTVLGGEYPLTKGDEVMVLVPQLHRDKTIWGDDVEEFRPERFENPSAIPQHAFKPFGNGQRACIGQQFALHSATLVLGMMLKHFDFEDHTNYELVIKESRTLKPEGFVVKAKSKGIPLGGIPSPSTEQSAKKVRKKAENAHNTPLLVLYGSNAGTAEGTARDLADIAMSKGFAPQVATLTSHAGNLPREGAVLIVTASYNGHPPDNAKQFVDWLDQASADEVKGVRYSVFGCGDKNWAGTYQKVPAFIDETLAAKGAENIAKRGEADASDDFEGAYEEWRDHMWSDVAAYFGLDIENSEDNKSTLSLQFVDSAADMPLAKMHGAFSTNVVASKELQQPGSARSTRHLEIELPKEASYQEGDHLGVIPRYYEGIVNRVTQRFGLSASQLIRLEAEEEKLAHLPLAKTVSVEELLQYVELQDPVTRTQLRAMAAKTVCPPHKVELEALLGKQAYKEQVLAKRLTMLELLEKYPACEMSFSEFIALLPSIRPRYYSISSSPRVDLKQASITVSVVSGPAWSGYGEYKGIASNYLAELQEGDTITCFISTPQSEFTLPKDPETPLIMVGPGTGVAPFRGFVQARKQLKEQGQSLGEAHLYFGCRSPHEDYLYQEELENAQSEGIILLHTAFSRMPNQPKTYVQHVMEQDGKKLIELLDQGAHFYICGDGIQMAPAVEATLMKSYADVHQVSEADARLWLQQLEEKGRYAKDVWLG

SEQ ID NO: 1227 - DNA, 3147 bp, synthetic construct
  misc_feature 1..3147: note = variant of P450 oxidase from Bacillus megaterium
  source 1..3147: mol_type = other DNA
atgacaattaaggaaatgcctcagcctaagacgtttggagaacttaaaaatttaccgttattaaatacagataaaccggttcaagctttgatgcgtattgcggatgaattaggagaaatctttaaattcgaggcgcctggtagcgtaacgcgctatttatcaagtcagcgtctaattaaagaagcatgcgatgaatcacgctttgataaaaacttaagtcaagggcttaaatttgcacgtgattttgttggagacgggctggttacaagctggacgcatgaaccgaattggaaaaaagcgcataatatcttagttccaagctttagtcagcatgcaatggggcgttatcatgcgatgatggtcgatatcgccgtgcagcttgttcaaaagtgggagcgtctaaatgcagatgagcatattgaagtatcggaagacatgacacgtttaacgcttgatacaattggtctttgcctgtttaactatcgctttaacagcttttaccgagatacgcctcatccatttattgtgagtgtggttcgtgcactggatgaagtaatgaacaagctgcagcgagcaaatccagacgacccagcttatgatgaaaacaagcgccagtgtcaagaagatatcaaggtgatgaacgactatgtagataaaattattgcagatcgcaaagcaaggggtgaacaaagtcatgatttattaacgcagatgctaaacggaaaagatccagaaacgggtgagccgcttgatgacgggaacattcgtcagcaaattattacattcttaattgcgggacaccaaacgacaagtggtcttttatcatttgcgctgtatttcttagtgaaaaatccacgtgtattacaaaaagtagcagaagaagcagcacgagttctagtagatcctgttccaagctacaaacaagtcaaacagcttaaatatgttggcatggtcttaaacgaagcgctgcgcttatggccagtagcgcctatgttttccctatatgcaaaagaagatacggtgcttggaggagaatatcctttaacgaaaggcgacgaagtaatggttctggtgcctcagcttcaccgtgataaaacaatttggggagacgatgtggaggagttccgtccagagcgttttgaaaatccaagtgcgattccgcagcatgcgtttaaaccgtttggaaacggtcagcgtgcgtgtatcggtcagcagttcgctcttcatagtgcaacgctggtacttggtatgatgctaaaacactttgactttgaagatcatacaaactacgagctcgttattaaagaatcgcggacgttaaaacctgaaggctttgtggtaaaagcaaaatcgaaaggcattccgcttggcggtattccttcacctagcactgaacagtctgctaaaaaagtacgcaaaaaggcagaaaacgctcataatacgccgctgcttgtgctatacggttcaaatgcgggaacagctgaaggaacggcgcgtgatttagcagatattgcaatgagcaaaggatttgcaccgcaggtcgcaacgcttaattcacacgccggtaatcttccgcgcgaaggagctgtattaattgtaacggcgtcttataacggtcatccgcctgataacgcaaagcaatttgtcgattggttagaccaagcgtctgcggatgaagtaaaaggcgttcgctactccgtatttggatgcggcgataaaaattgggcggggacgtatcaaaaagtgcctgcttttatcgatgaaacgcttgccgctaaaggggcagaaaacatcgctaagcgcggtgaagcagatgcaagcgacgactttgaaggcgcgtatgaagaatggcgtgatcatatgtggagtgacgtagcagcctactttggtctcgacattgaaaacagtgaagataataaatctactctttcacttcaatttgtcgacagcgcgtcggatatgcctcttgcgaaaatgcacggtgcgttttcaacgaacgtcgtagcaagcaaagaacttcaacagcctggcagtgcacgaagcacgcgacatcttgaaattgaacttccaaaagaagcttcttatcaagaaggagatcatttaggtgttattcctcgctattatgaaggaatagtaaaccgtgtaacacagaggttcggcctaagcgcatcacagctgatccgtctggaagcagaagaagaaaaattagctcatttgccactcgctaaaacagtatccgtagaagagcttctgcaatacgtggagcttcaagatcctgttacgcgcacgcagcttcgcgcaatggctgctaaaacggtctgcccgccgcataaagtagagcttgaagccttgcttggcaagcaagcctacaaagaacaagtgctggcaaaacgtttaacaatgcttgaactgcttgaaaaatacccggcgtgtgaaatgagtttcagcgaatttatcgcccttctgccaagcatacgcccgcgctattactcgatttcttcatcacctcgtgtcgatctgaaacaagcaagcatcacggtcagcgttgtcagcggaccggcgtggagcggatatggagaatataaaggaattgcgtcgaactatcttgctgagctgcaagaaggagatacgattacgtgctttatttccacaccgcagtcagagtttacgctgccaaaagaccctgaaacgccgcttatcatggtcggaccgggaacaggcgtcgcgccgtttagaggctttgtgcaggcgcgcaaacagctaaaagaacaaggacagtcacttggagaagcacatttatacttcggctgccgttcacctcatgaagactatctgtatcaagaagagcttgaaaacgcccaaagcgaaggcatcattctgcttcataccgctttttctcgcatgccgaatcagccgaaaacatacgttcagcacgtaatggaacaagacggcaagaaattgattgaacttcttgatcaaggagcgcacttctatatttgcggagacggaattcaaatggcacctgccgttgaagcaacgcttatgaaaagctatgctgacgttcaccaagtgagtgaagcagacgctcgcttatggctgcagcagctagaagaaaaaggccgatacgcaaaagacgtgtggctgggg

SEQ ID NO: 1228 - protein, 1049 aa, synthetic construct
  REGION 1..1049: note = variant of P450 oxidase from Bacillus megaterium
MTIKEMPQPKTFGELKNLPLLNTDKPVQALMRIADELGEIFKFEAPGSVTRYLSSQRLIKEACDESRFDKNLSQGLKFARDFVGDGLVTSWTHEPNWKKAHNILVPSFSQHAMGRYHAMMVDIAVQLVQKWERLNADEHIEVSEDMTRLTLDTIGLCLFNYRFNSFYRDTPHPFIVSVVRALDEVMNKLQRANPDDPAYDENKRQCQEDIKVMNDYVDKIIADRKARGEQSHDLLTQMLNGKDPETGEPLDDGNIRQQIITFLIAGHQTTSGLLSFALYFLVKNPRVLQKVAEEAARVLVDPVPSYKQVKQLKYVGMVLNEALRLWPVAPMFSLYAKEDTVLGGEYPLTKGDEVMVLVPQLHRDKTIWGDDVEEFRPERFENPSAIPQHAFKPFGNGQRACIGQQFALHSATLVLGMMLKHFDFEDHTNYELVIKESRTLKPEGFVVKAKSKGIPLGGIPSPSTEQSAKKVRKKAENAHNTPLLVLYGSNAGTAEGTARDLADIAMSKGFAPQVATLNSHAGNLPREGAVLIVTASYNGHPPDNAKQFVDWLDQASADEVKGVRYSVFGCGDKNWAGTYQKVPAFIDETLAAKGAENIAKRGEADASDDFEGAYEEWRDHMWSDVAAYFGLDIENSEDNKSTLSLQFVDSASDMPLAKMHGAFSTNVVASKELQQPGSARSTRHLEIELPKEASYQEGDHLGVIPRYYEGIVNRVTQRFGLSASQLIRLEAEEEKLAHLPLAKTVSVEELLQYVELQDPVTRTQLRAMAAKTVCPPHKVELEALLGKQAYKEQVLAKRLTMLELLEKYPACEMSFSEFIALLPSIRPRYYSISSSPRVDLKQASITVSVVSGPAWSGYGEYKGIASNYLAELQEGDTITCFISTPQSEFTLPKDPETPLIMVGPGTGVAPFRGFVQARKQLKEQGQSLGEAHLYFGCRSPHEDYLYQEELENAQSEGIILLHTAFSRMPNQPKTYVQHVMEQDGKKLIELLDQGAHFYICGDGIQMAPAVEATLMKSYADVHQVSEADARLWLQQLEEKGRYAKDVWLG

SEQ ID NO: 1229 - DNA, 3147 bp, synthetic construct
  misc_feature 1..3147: note = variant of P450 oxidase from Bacillus megaterium
  source 1..3147: mol_type = other DNA
atgacaattaaggaaatgcctcagcctaagacgtttggagaacttaaaaatttaccgttattaaatacagataaaccggttcaagctttgatgcgtattgcggatgaattaggagaaatctttaaattcgaggcgcctggtagcgtaacgcgctatttatcaagtcagcgtctaattaaagaagcatgcgatgaatcacgctttgataaaaacttaagtcaagggcttaaatttgcacgtgattttgttggagacgggctggttacaagctggacgcatgaaccgaattggaaaaaagcgcataatatcttagttccaagctttagtcagcatgcaatggggcgttatcatgcgatgatggtcgatatcgccgtgcagcttgttcaaaagtgggagcgtctaaatgcagatgagcatattgaagtatcggaagacatgacacgtttaacgcttgatacaattggtctttgcctgtttaactatcgctttaacagcttttaccgagatacgcctcatccatttattgtgagtgtggttcgtgcactggatgaagtaatgaacaagctgcagcgagcaaatccagacgacccagcttatgatgaaaacaagcgccagtgtcaagaagatatcaaggtgatgaacgactatgtagataaaattattgcagatcgcaaagcaaggggtgaacaaagtcatgatttattaacgcagatgctaaacggaaaagatccagaaacgggtgagccgcttgatgacgggaacattcgtcagcaaattattacattcttaattgcgggacaccaaacgacaagtggtcttttatcatttgcgctgtatttcttagtgaaaaatccacgtgtattacaaaaagtagcagaagaagcagcacgagttctagtagatcctgttccaagctacaaacaagtcaaacagcttaaatatgttggcatggtcttaaacgaagcgctgcgcttatggccagtagcgcctatgttttccctatatgcaaaagaagatacggtgcttggaggagaatatcctttaacgaaaggcgacgaagtaatggttctggtgcctcagcttcaccgtgataaaacaatttggggagacgatgtggaggagttccgtccagagcgttttgaaaatccaagtgcgattccgcagcatgcgtttaaaccgtttggaaacggtcagcgtgcgtgtatcggtcagcagttcgctcttcatagtgcaacgctggtacttggtatgatgctaaaacactttgactttgaagatcatacaaactacgagctcgttattaaagaatcgcggacgttaaaacctgaaggctttgtggtaaaagcaaaatcgaaaggcattccgcttggcggtattccttcacctagcactgaacagtctgctaaaaaagtacgcaaaaaggcagaaaacgctcataatacgccgctgcttgtgctatacggttcaaatgcgggaacagctgaaggaacggcgcgtgatttagcagatattgcaatgagcaaaggatttgcaccgcaggtcgcaacgcttagttcacacgccggtaatcttccgcgcgaaggagctgtattaattgtaacggcgtcttataacggtcatccgcctgataacgcaaagcaatttgtcgattggttagaccaagcgtctgcggatgaagtaaaaggcgttcgctactccgtatttggatgcggcgataaaaattgggcggggacgtatcaaaaagtgcctgcttttatcgatgaaacgcttgccgctaaaggggcagaaaacatcgctaagcgcggtgaagcagatgcaagcgacgactttgaaggcgcgtatgaagaatggcgtgatcatatgtggagtgacgtagcagcctactttggtctcgacattgaaaacagtgaagataataaatctactctttcacttcaatttgtcgacagcgcggcggatatgcctcttgcgaaaatgcacggtgcgttttcaacgaacgtcgtagcaagcaaagaacttcaacagcctggcagtgcacgaagcacgcgacatcttgaaattgaacttccaaaagaagcttcttatcaagaaggagatcatttaggtgttattcctcgctattatgaaggaatagtaaaccgtgtaacacagaggttcggcctaagcgcatcacagctgatccgtctggaagcagaagaagaaaaattagctcatttgccactcgctaaaacagtatccgtagaagagcttctgcaatacgtggagcttcaagatcctgttacgcgcacgcagcttcgcgcaatggctgctaaaacggtctgcccgccgcataaagtagagcttgaagccttgcttggcaagcaagcctacaaagaacaagtgctggcaaaacgtttaacaatgcttgaactgcttgaaaaatacccggcgtgtgaaatgagtttcagcgaatttatcgcccttctgccaagcatacgcccgcgctattactcgatttcttcatcacctcgtgtcgatctgaaacaagcaagcatcacggtcagcgttgtcagcggaccggcgtggagcggatatggagaatataaaggaattgcgtcgaactatcttgctgagctgcaagaaggagatacgattacgtgctttatttccacaccgcagtcagagtttacgctgccaaaagaccctgaaacgccgcttatcatggtcggaccgggaacaggcgtcgcgccgtttagaggctttgtgcaggcgcgcaaacagctaaaagaacaaggacagtcacttggagaagcacatttatacttcggctgccgttcacctcatgaagactatctgtatcaagaagagcttgaaaacgcccaaagcgaaggcatcattctgcttcataccgctttttctcgcatgccgaatcagccgaaaacatacgttcagcacgtaatggaacaagacggcaagaaattgattgaacttcttgatcaaggagcgcacttctatatttgcggagacggaattcaaatggcacctgccgttgaagcaacgcttatgaaaagctatgctgacgttcaccaagtgagtgaagcagacgctcgcttatggctgcagcagctagaagaaaaaggccgatacgcaaaagacgtgtggctgggg

SEQ ID NO: 1230 - protein, 1049 aa, synthetic construct
  REGION 1..1049: note = variant of P450 oxidase from Bacillus megaterium
MTIKEMPQPKTFGELKNLPLLNTDKPVQALMRIADELGEIFKFEAPGSVTRYLSSQRLIKEACDESRFDKNLSQGLKFARDFVGDGLVTSWTHEPNWKKAHNILVPSFSQHAMGRYHAMMVDIAVQLVQKWERLNADEHIEVSEDMTRLTLDTIGLCLFNYRFNSFYRDTPHPFIVSVVRALDEVMNKLQRANPDDPAYDENKRQCQEDIKVMNDYVDKIIADRKARGEQSHDLLTQMLNGKDPETGEPLDDGNIRQQIITFLIAGHQTTSGLLSFALYFLVKNPRVLQKVAEEAARVLVDPVPSYKQVKQLKYVGMVLNEALRLWPVAPMFSLYAKEDTVLGGEYPLTKGDEVMVLVPQLHRDKTIWGDDVEEFRPERFENPSAIPQHAFKPFGNGQRACIGQQFALHSATLVLGMMLKHFDFEDHTNYELVIKESRTLKPEGFVVKAKSKGIPLGGIPSPSTEQSAKKVRKKAENAHNTPLLVLYGSNAGTAEGTARDLADIAMSKGFAPQVATLSSHAGNLPREGAVLIVTASYNGHPPDNAKQFVDWLDQASADEVKGVRYSVFGCGDKNWAGTYQKVPAFIDETLAAKGAENIAKRGEADASDDFEGAYEEWRDHMWSDVAAYFGLDIENSEDNKSTLSLQFVDSAADMPLAKMHGAFSTNVVASKELQQPGSARSTRHLEIELPKEASYQEGDHLGVIPRYYEGIVNRVTQRFGLSASQLIRLEAEEEKLAHLPLAKTVSVEELLQYVELQDPVTRTQLRAMAAKTVCPPHKVELEALLGKQAYKEQVLAKRLTMLELLEKYPACEMSFSEFIALLPSIRPRYYSISSSPRVDLKQASITVSVVSGPAWSGYGEYKGIASNYLAELQEGDTITCFISTPQSEFTLPKDPETPLIMVGPGTGVAPFRGFVQARKQLKEQGQSLGEAHLYFGCRSPHEDYLYQEELENAQSEGIILLHTAFSRMPNQPKTYVQHVMEQDGKKLIELLDQGAHFYICGDGIQMAPAVEATLMKSYADVHQVSEADARLWLQQLEEKGRYAKDVWLG

SEQ ID NO: 1231 - DNA, 3147 bp, synthetic construct
  misc_feature 1..3147: note = variant of P450 oxidase from Bacillus megaterium
  source 1..3147: mol_type = other DNA
atgacaattaaggaaatgcctcagcctaagacgtttggagaacttaaaaatttaccgttattaaatacagataaaccggttcaagctttgatgcgtattgcggatgaattaggagaaatctttaaattcgaggcgcctggtagcgtaacgcgctatttatcaagtcagcgtctaattaaagaagcatgcgatgaatcacgctttgataaaaacttaagtcaagggcttaaatttgcacgtgattttgttggagacgggctggttacaagctggacgcatgaaccgaattggaaaaaagcgcataatatcttagttccaagctttagtcagcatgcaatggggcgttatcatgcgatgatggtcgatatcgccgtgcagcttgttcaaaagtgggagcgtctaaatgcagatgagcatattgaagtatcggaagacatgacacgtttaacgcttgatacaattggtctttgcctgtttaactatcgctttaacagcttttaccgagatacgcctcatccatttattgtgagtgtggttcgtgcactggatgaagtaatgaacaagctgcagcgagcaaatccagacgacccagcttatgatgaaaacaagcgccagtgtcaagaagatatcaaggtgatgaacgactatgtagataaaattattgcagatcgcaaagcaaggggtgaacaaagtcatgatttattaacgcagatgctaaacggaaaagatccagaaacgggtgagccgcttgatgacgggaacattcgtcagcaaattattacattcttaattgcgggacaccaaacgacaagtggtcttttatcatttgcgctgtatttcttagtgaaaaatccacgtgtattacaaaaagtagcagaagaagcagcacgagttctagtagatcctgttccaagctacaaacaagtcaaacagcttaaatatgttggcatggtcttaaacgaagcgctgcgcttatggccagtagcgcctatgttttccctatatgcaaaagaagatacggtgcttggaggagaatatcctttaacgaaaggcgacgaagtaatggttctggtgcctcagcttcaccgtgataaaacaatttggggagacgatgtggaggagttccgtccagagcgttttgaaaatccaagtgcgattccgcagcatgcgtttaaaccgtttggaaacggtcagcgtgcgtgtatcggtcagcagttcgctcttcatagtgcaacgctggtacttggtatgatgctaaaacactttgactttgaagatcatacaaactacgagctcgttattaaagaatcgcggacgttaaaacctgaaggctttgtggtaaaagcaaaatcgaaaggcattccgcttggcggtattccttcacctagcactgaacagtctgctaaaaaagtacgcaaaaaggcagaaaacgctcataatacgccgctgcttgtgctatacggttcaaatgcgggaacagctgaaggaacggcgcgtgatttagcagatattgcaatgagcaaaggatttgcaccgcaggtcgcaacgcttggttcacacgccggtaatcttccgcgcgaaggagctgtattaattgtaacggcgtcttataacggtcatccgcctgataacgcaaagcaatttgtcgattggttagaccaagcgtctgcggatgaagtaaaaggcgttcgctactccgtatttggatgcggcgataaaaattgggcggggacgtatcaaaaagtgcctgcttttatcgatgaaacgcttgccgctaaaggggcagaaaacatcgctaagcgcggtgaagcagatgcaagcgacgactttgaaggcgcgtatgaagaatggcgtgatcatatgtggagtgacgtagcagcctactttggtctcgacattgaaaacagtgaagataataaatctactctttcacttcaatttgtcgacagcgcggcggatatgcctcttgcgaaaatgcacggtgcgttttcaacgaacgtcgtagcaagcaaagaacttcaacagcctggcagtgcacgaagcacgcgacatcttgaaattgaacttccaaaagaagcttcttatcaagaaggagatcatttaggtgttattcctcgctattatgaaggaatagtaaaccgtgtaacacagaggttcggcctaagcgcatcacagctgatccgtctggaagcagaagaagaaaaattagctcatttgccactcgctaaaacagtatccgtagaagagcttctgcaatacgtggagcttcaagatcctgttacgcgcacgcagcttcgcgcaatggctgctaaaacggtctgcccgccgcataaagtagagcttgaagccttgcttggcaagcaagcctacaaagaacaagtgctggcaaaacgtttaacaatgcttgaactgcttgaaaaatacccggcgtgtgaaatgagtttcagcgaatttatcgcccttctgccaagcatacgcccgcgctattactcgatttcttcatcacctcgtgtcgatctgaaacaagcaagcatcacggtcagcgttgtcagcggaccggcgtggagcggatatggagaatataaaggaattgcgtcgaactatcttgctgagctgcaagaaggagatacgattacgtgctttatttccacaccgcagtcagagtttacgctgccaaaagaccctgaaacgccgcttatcatggtcggaccgggaacaggcgtcgcgccgtttagaggctttgtgcaggcgcgcaaacagctaaaagaacaaggacagtcacttggagaagcacatttatacttcggctgccgttcacctcatgaagactatctgtatcaagaagagcttgaaaacgcccaaagcgaaggcatcattctgcttcataccgctttttctcgcatgccgaatcagccgaaaacatacgttcagcacgtaatggaacaagacggcaagaaattgattgaacttcttgatcaaggagcgcacttctatatttgcggagacggaattcaaatggcacctgccgttgaagcaacgcttatgaaaagctatgctgacgttcaccaagtgagtgaagcagacgctcgcttatggctgcagcagctagaagaaaaaggccgatacgcaaaagacgtgtggctgggg

SEQ ID NO: 1232 - protein, 1049 aa, synthetic construct
  REGION 1..1049: note = variant of P450 oxidase from Bacillus megaterium
MTIKEMPQPKTFGELKNLPLLNTDKPVQALMRIADELGEIFKFEAPGSVTRYLSSQRLIKEACDESRFDKNLSQGLKFARDFVGDGLVTSWTHEPNWKKAHNILVPSFSQHAMGRYHAMMVDIAVQLVQKWERLNADEHIEVSEDMTRLTLDTIGLCLFNYRFNSFYRDTPHPFIVSVVRALDEVMNKLQRANPDDPAYDENKRQCQEDIKVMNDYVDKIIADRKARGEQSHDLLTQMLNGKDPETGEPLDDGNIRQQIITFLIAGHQTTSGLLSFALYFLVKNPRVLQKVAEEAARVLVDPVPSYKQVKQLKYVGMVLNEALRLWPVAPMFSLYAKEDTVLGGEYPLTKGDEVMVLVPQLHRDKTIWGDDVEEFRPERFENPSAIPQHAFKPFGNGQRACIGQQFALHSATLVLGMMLKHFDFEDHTNYELVIKESRTLKPEGFVVKAKSKGIPLGGIPSPSTEQSAKKVRKKAENAHNTPLLVLYGSNAGTAEGTARDLADIAMSKGFAPQVATLGSHAGNLPREGAVLIVTASYNGHPPDNAKQFVDWLDQASADEVKGVRYSVFGCGDKNWAGTYQKVPAFIDETLAAKGAENIAKRGEADASDDFEGAYEEWRDHMWSDVAAYFGLDIENSEDNKSTLSLQFVDSAADMPLAKMHGAFSTNVVASKELQQPGSARSTRHLEIELPKEASYQEGDHLGVIPRYYEGIVNRVTQRFGLSASQLIRLEAEEEKLAHLPLAKTVSVEELLQYVELQDPVTRTQLRAMAAKTVCPPHKVELEALLGKQAYKEQVLAKRLTMLELLEKYPACEMSFSEFIALLPSIRPRYYSISSSPRVDLKQASITVSVVSGPAWSGYGEYKGIASNYLAELQEGDTITCFISTPQSEFTLPKDPETPLIMVGPGTGVAPFRGFVQARKQLKEQGQSLGEAHLYFGCRSPHEDYLYQEELENAQSEGIILLHTAFSRMPNQPKTYVQHVMEQDGKKLIELLDQGAHFYICGDGIQMAPAVEATLMKSYADVHQVSEADARLWLQQLEEKGRYAKDVWLG

SEQ ID NO: 1233 - DNA, 3147 bp, synthetic construct
  misc_feature 1..3147: note = variant of P450 oxidase from Bacillus megaterium
  source 1..3147: mol_type = other DNA
atgacaattaaggaaatgcctcagcctaagacgtttggagaacttaaaaatttaccgttattaaatacagataaaccggttcaagctttgatgcgtattgcggatgaattaggagaaatctttaaattcgaggcgcctggtagcgtaacgcgctatttatcaagtcagcgtctaattaaagaagcatgcgatgaatcacgctttgataaaaacttaagtcaagggcttaaatttgcacgtgattttgttggagacgggctggttacaagctggacgcatgaaccgaattggaaaaaagcgcataatatcttagttccaagctttagtcagcatgcaatggggcgttatcatgcgatgatggtcgatatcgccgtgcagcttgttcaaaagtgggagcgtctaaatgcagatgagcatattgaagtatcggaagacatgacacgtttaacgcttgatacaattggtctttgcctgtttaactatcgctttaacagcttttaccgagatacgcctcatccatttattgtgagtgtggttcgtgcactggatgaagtaatgaacaagctgcagcgagcaaatccagacgacccagcttatgatgaaaacaagcgccagtgtcaagaagatatcaaggtgatgaacgactatgtagataaaattattgcagatcgcaaagcaaggggtgaacaaagtcatgatttattaacgcagatgctaaacggaaaagatccagaaacgggtgagccgcttgatgacgggaacattcgtcagcaaattattacattcttaattgcgggacaccaaacgacaagtggtcttttatcatttgcgctgtatttcttagtgaaaaatccacgtgtattacaaaaagtagcagaagaagcagcacgagttctagtagatcctgttccaagctacaaacaagtcaaacagcttaaatatgttggcatggtcttaaacgaagcgctgcgcttatggccagtagcgcctatgttttccctatatgcaaaagaagatacggtgcttggaggagaatatcctttaacgaaaggcgacgaagtaatggttctggtgcctcagcttcaccgtgataaaacaatttggggagacgatgtggaggagttccgtccagagcgttttgaaaatccaagtgcgattccgcagcatgcgtttaaaccgtttggaaacggtcagcgtgcgtgtatcggtcagcagttcgctcttcatagtgcaacgctggtacttggtatgatgctaaaacactttgactttgaagatcatacaaactacgagctcgttattaaagaatcgcggacgttaaaacctgaaggctttgtggtaaaagcaaaatcgaaaggcattccgcttggcggtattccttcacctagcactgaacagtctgctaaaaaagtacgcaaaaaggcagaaaacgctcataatacgccgctgcttgtgctatacggttcaaatgcgggaacagctgaaggaacggcgcgtgatttagcagatattgcaatgagcaaaggatttgcaccgcaggtcgcaacgcttgattcacacgccggtaatcttccgcgcgaaggagctgtattaattgtaacggcgtcttataacggtcatccgcctgataacgcaaagcaatttgtcgattggttagaccaagcgtctgcggatgaagtaaaaggcgttcgctactccgtatttggatgcggcgataaaaattgggcggggacgtatcaaaaagtgcctggttttatcgatgaaacgcttgccgctaaaggggcagaaaacatcgctaagcgcggtgaagcagatgcaagcgacgactttgaaggcgcgtatgaagaatggcgtgatcatatgtggagtgacgtagcagcctactttggtctcgacattgaaaacagtgaagataataaatctactctttcacttcaatttgtcgacagcgcggcggatatgcctcttgcgaaaatgcacggtgcgttttcaacgaacgtcgtagcaagcaaagaacttcaacagcctggcagtgcacgaagcacgcgacatcttgaaattgaacttccaaaagaagcttcttatcaagaaggagatcatttaggtgttattcctcgctattatgaaggaatagtaaaccgtgtaacacagaggttcggcctaagcgcaccacagctgatccgtctggaagcagaagaagaaaaattagctcatttgccactcgctaaaacagtatccgtagaagagcttctgcaatacgtggagcttcaagatcctgttacgcgcacgcagcttcgcgcaatggctgctaaaacggtctgcccgccgcataaagtagagcttgaagccttgcttggcaagcaagcctacaaagaacaagtgctggcaaaacgtttaacaatgcttgaactgcttgaaaaatacccggcgtgtgaaatgagtttcagcgaatttatcgcccttctgccaagcatacgcccgcgctattactcgatttcttcatcacctcgtgtcgatctgaaacaagcaagcatcacggtcagcgttgtcagcggaccggcgtggagcggatatggagaatataaaggaattgcgtcgaactatcttgctgagctgcaagaaggagatacgattacgtgctttatttccacaccgcagtcagagtttacgctgccaaaagaccctgaaacgccgcttatcatggtcggaccgggaacaggcgtcgcgccgtttagaggctttgtgcaggcgcgcaaacagctaaaagaacaaggacagtcacttggagaagcacatttatacttcggctgccgttcacctcatgaagactatctgtatcaagaagagcttgaaaacgcccaaagcgaaggcatcattctgcttcataccgctttttctcgcatgccgaatcagccgaaaacatacgttcagcacgtaatggaacaagacggcaagaaattgattgaacttcttgatcaaggagcgcacttctatatttgcggagacggaattcaaatggcacctgccgttgaagcaacgcttatgaaaagctatgctgacgttcaccaagtgagtgaagcagacgctcgcttatggctgcagcagctagaagaaaaaggccgatacgcaaaagacgtgtggctgggg

SEQ ID NO: 1234 - protein, 1049 aa, synthetic construct
  REGION 1..1049: note = variant of P450 oxidase from Bacillus megaterium
MTIKEMPQPKTFGELKNLPLLNTDKPVQALMRIADELGEIFKFEAPGSVTRYLSSQRLIKEACDESRFDKNLSQGLKFARDFVGDGLVTSWTHEPNWKKAHNILVPSFSQHAMGRYHAMMVDIAVQLVQKWERLNADEHIEVSEDMTRLTLDTIGLCLFNYRFNSFYRDTPHPFIVSVVRALDEVMNKLQRANPDDPAYDENKRQCQEDIKVMNDYVDKIIADRKARGEQSHDLLTQMLNGKDPETGEPLDDGNIRQQIITFLIAGHQTTSGLLSFALYFLVKNPRVLQKVAEEAARVLVDPVPSYKQVKQLKYVGMVLNEALRLWPVAPMFSLYAKEDTVLGGEYPLTKGDEVMVLVPQLHRDKTIWGDDVEEFRPERFENPSAIPQHAFKPFGNGQRACIGQQFALHSATLVLGMMLKHFDFEDHTNYELVIKESRTLKPEGFVVKAKSKGIPLGGIPSPSTEQSAKKVRKKAENAHNTPLLVLYGSNAGTAEGTARDLADIAMSKGFAPQVATLDSHAGNLPREGAVLIVTASYNGHPPDNAKQFVDWLDQASADEVKGVRYSVFGCGDKNWAGTYQKVPGFIDETLAAKGAENIAKRGEADASDDFEGAYEEWRDHMWSDVAAYFGLDIENSEDNKSTLSLQFVDSAADMPLAKMHGAFSTNVVASKELQQPGSARSTRHLEIELPKEASYQEGDHLGVIPRYYEGIVNRVTQRFGLSAPQLIRLEAEEEKLAHLPLAKTVSVEELLQYVELQDPVTRTQLRAMAAKTVCPPHKVELEALLGKQAYKEQVLAKRLTMLELLEKYPACEMSFSEFIALLPSIRPRYYSISSSPRVDLKQASITVSVVSGPAWSGYGEYKGIASNYLAELQEGDTITCFISTPQSEFTLPKDPETPLIMVGPGTGVAPFRGFVQARKQLKEQGQSLGEAHLYFGCRSPHEDYLYQEELENAQSEGIILLHTAFSRMPNQPKTYVQHVMEQDGKKLIELLDQGAHFYICGDGIQMAPAVEATLMKSYADVHQVSEADARLWLQQLEEKGRYAKDVWLG

SEQ ID NO: 1235 - DNA, 3147 bp, synthetic construct
  misc_feature 1..3147: note = variant of P450 oxidase from Bacillus megaterium
  source 1..3147: mol_type = other DNA
atgacaattaaggaaatgcctcagcctaagacgtttggagaacttaaaaatttaccgttattaaatacagataaaccggttcaagctttgatgcgtattgcggatgaattaggagaaatctttaaattcgaggcgcctggtagcgtaacgcgctatttatcaagtcagcgtctaattaaagaagcatgcgatgaatcacgctttgataaaaacttaagtcaagggcttaaatttgcacgtgattttgttggagacgggctggttacaagctggacgcatgaaccgaattggaaaaaagcgcataatatcttagttccaagctttagtcagcatgcaatggggcgttatcatgcgatgatggtcgatatcgccgtgcagcttgttcaaaagtgggagcgtctaaatgcagatgagcatattgaagtatcggaagacatgacacgtttaacgcttgatacaattggtctttgcctgtttaactatcgctttaacagcttttaccgagatacgcctcatccatttattgtgagtgtggttcgtgcactggatgaagtaatgaacaagctgcagcgagcaaatccagacgacccagcttatgatgaaaacaagcgccagtgtcaagaagatatcaaggtgatgaacgactatgtagataaaattattgcagatcgcaaagcaaggggtgaacaaagtcatgatttattaacgcagatgctaaacggaaaagatccagaaacgggtgagccgcttgatgacgggaacattcgtcagcaaattattacattcttaattgcgggacaccaaacgacaagtggtcttttatcatttgcgctgtatttcttagtgaaaaatccacgtgtattacaaaaagtagcagaagaagcagcacgagttctagtagatcctgttccaagctacaaacaagtcaaacagcttaaatatgttggcatggtcttaaacgaagcgctgcgcttatggccagtagcgcctatgttttccctatatgcaaaagaagatacggtgcttggaggagaatatcctttaacgaaaggcgacgaagtaatggttctggtgcctcagcttcaccgtgataaaacaatttggggagacgatgtggaggagttccgtccagagcgttttgaaaatccaagtgcgattccgcagcatgcgtttaaaccgtttggaaacggtcagcgtgcgtgtatcggtcagcagttcgctcttcatagtgcaacgctggtacttggtatgatgctaaaacactttgactttgaagatcatacaaactacgagctcgttattaaagaatcgcggacgttaaaacctgaaggctttgtggtaaaagcaaaatcgaaaggcattccgcttggcggtattccttcacctagcactgaacagtctgctaaaaaagtacgcaaaaaggcagaaaacgctcataatacgccgctgcttgtgctatacggttcaaatgcgggaacagctgaaggaacggcgcgtgatttagcagatattgcaatgagcaaaggatttgcaccgcaggtcgcaacgcttgattcacacgccggtaatcttccgcgcgaaggagctgtattaattgtaacggcgtcttataacggtcatccgcctgataacgcaaagcaatttgtcgattggttagaccaagcgtctgcggatgaagtaaaaggcctgcgctactccgtatttggatgcggcgataaaaattgggcggggacgtatcaaaaagtgcctgcttttatcgatgaaacgcttgccgctaaaggggcagaaaacatcgctaagcgcggtgaagcagatgcaagcgacgactttgaaggcgcgtatgaagaatggcgtgatcatatgtggagtgacgtagcagcctactttggtctcgacattgaaaacagtgaagataataaatctactctttcacttcaatttgtcgacagcgcggcggatatgcctcttgcgaaaatgcacggtgcgttttcaacgaacgtcgtagcaagcaaagaacttcaacagcctggcagtgcacgaagcacgcgacatcttgaaattgaacttccaaaagaagcttcttatcaagaaggagatcatttaggtgttattcctcgctattatgaaggaatagtaaaccgtgtaacacagaggttcggcctaagcgcatcacagctgatccgtctggaagcagaagaagaaaaattagctcatttgccactcgctaaaacagtatccgtagaagagcttctgcaatacgtggagcttcaagatcctgttacgcgcacgcagcttcgcgcaatggctgctaaaacggtctgcccgccgcataaagtagagcttgaagccttgcttggcaagcaagcctacaaagaacaagtgctggcaaaacgtttaacaatgcttgaactgcttgaaaaatacccggcgtgtgaaatgagtttcagcgaatttatcgcccttctgccaagcatacgcccgcgctattactcgatttcttcatcacctcgtgtcgatctgaaacaagcaagcatcacggtcagcgttgtcagcggaccggcgtggagcggatatggagaatataaaggaattgcgtcgaactatcttgctgagctgcaagaaggagatacgattacgtgctttatttccacaccgcagtcagagtttacgctgccaaaagaccctgaaacgccgcttatcatggtcggaccgggaacaggcgtcgcgccgtttagaggctttgtgcaggcgcgcaaacagctaaaagaacaaggacagtcacttggagaagcacatttatacttcggctgccgttcacctcatgaagactatctgtatcaagaagagcttgaaaacgcccaaagcgaaggcatcattctgcttcataccgctttttctcgcatgccgaatcagccgaaaacatacgttcagcacgtaatggaacaagacggcaagaaattgattgaacttcttgatcaaggagcgcacttctatatttgcggagacggaattcaaatggcacctgccgttgaagcaacgcttatgaaaagctatgctgacgttcaccaagtgagtgaagcagacgctcgcttatggctgcagcagctagaagaaaaaggccgatacgcaaaagacgtgtggctgggg

SEQ ID NO: 1236 - protein, 1049 aa, synthetic construct
  REGION 1..1049: note = variant of P450 oxidase from Bacillus megaterium
MTIKEMPQPKTFGELKNLPLLNTDKPVQALMRIADELGEIFKFEAPGSVTRYLSSQRLIKEACDESRFDKNLSQGLKFARDFVGDGLVTSWTHEPNWKKAHNILVPSFSQHAMGRYHAMMVDIAVQLVQKWERLNADEHIEVSEDMTRLTLDTIGLCLFNYRFNSFYRDTPHPFIVSVVRALDEVMNKLQRANPDDPAYDENKRQCQEDIKVMNDYVDKIIADRKARGEQSHDLLTQMLNGKDPETGEPLDDGNIRQQIITFLIAGHQTTSGLLSFALYFLVKNPRVLQKVAEEAARVLVDPVPSYKQVKQLKYVGMVLNEALRLWPVAPMFSLYAKEDTVLGGEYPLTKGDEVMVLVPQLHRDKTIWGDDVEEFRPERFENPSAIPQHAFKPFGNGQRACIGQQFALHSATLVLGMMLKHFDFEDHTNYELVIKESRTLKPEGFVVKAKSKGIPLGGIPSPSTEQSAKKVRKKAENAHNTPLLVLYGSNAGTAEGTARDLADIAMSKGFAPQVATLDSHAGNLPREGAVLIVTASYNGHPPDNAKQFVDWLDQASADEVKGLRYSVFGCGDKNWAGTYQKVPAFIDETLAAKGAENIAKRGEADASDDFEGAYEEWRDHMWSDVAAYFGLDIENSEDNKSTLSLQFVDSAADMPLAKMHGAFSTNVVASKELQQPGSARSTRHLEIELPKEASYQEGDHLGVIPRYYEGIVNRVTQRFGLSASQLIRLEAEEEKLAHLPLAKTVSVEELLQYVELQDPVTRTQLRAMAAKTVCPPHKVELEALLGKQAYKEQVLAKRLTMLELLEKYPACEMSFSEFIALLPSIRPRYYSISSSPRVDLKQASITVSVVSGPAWSGYGEYKGIASNYLAELQEGDTITCFISTPQSEFTLPKDPETPLIMVGPGTGVAPFRGFVQARKQLKEQGQSLGEAHLYFGCRSPHEDYLYQEELENAQSEGIILLHTAFSRMPNQPKTYVQHVMEQDGKKLIELLDQGAHFYICGDGIQMAPAVEATLMKSYADVHQVSEADARLWLQQLEEKGRYAKDVWLG

SEQ ID NO: 1237 - DNA, 3147 bp, synthetic construct
  misc_feature 1..3147: note = variant of P450 oxidase from Bacillus megaterium
  source 1..3147: mol_type = other DNA
atgacaattaaggaaatgcctcagcctaagacgtttggagaacttaaaaatttaccgttattaaatacagataaaccggttcaagctttgatgcgtattgcggatgaattaggagaaatctttaaattcgaggcgcctggtagcgtaacgcgctatttatcaagtcagcgtctaattaaagaagcatgcgatgaatcacgctttgataaaaacttaagtcaagggcttaaatttgcacgtgattttgttggagacgggctggttacaagctggacgcatgaaccgaattggaaaaaagcgcataatatcttagttccaagctttagtcagcatgcaatggggcgttatcatgcgatgatggtcgatatcgccgtgcagcttgttcaaaagtgggagcgtctaaatgcagatgagcatattgaagtatcggaagacatgacacgtttaacgcttgatacaattggtctttgcctgtttaactatcgctttaacagcttttaccgagatacgcctcatccatttattgtgagtgtggttcgtgcactggatgaagtaatgaacaagctgcagcgagcaaatccagacgacccagcttatgatgaaaacaagcgccagtgtcaagaagatatcaaggtgatgaacgactatgtagataaaattattgcagatcgcaaagcaaggggtgaacaaagtcatgatttattaacgcagatgctaaacggaaaagatccagaaacgggtgagccgcttgatgacgggaacattcgtcagcaaattattacattcttaattgcgggacaccaaacgacaagtggtcttttatcatttgcgctgtatttcttagtgaaaaatccacgtgtattacaaaaagtagcagaagaagcagcacgagttctagtagatcctgttccaagctacaaacaagtcaaacagcttaaatatgttggcatggtcttaaacgaagcgctgcgcttatggccagtagcgcctatgttttccctatatgcaaaagaagatacggtgcttggaggagaatatcctttaacgaaaggcgacgaagtaatggttctggtgcctcagcttcaccgtgataaaacaatttggggagacgatgtggaggagttccgtccagagcgttttgaaaatccaagtgcgattccgcagcatgcgtttaaaccgtttggaaacggtcagcgtgcgtgtatcggtcagcagttcgctcttcatagtgcaacgctggtacttggtatgatgctaaaacactttgactttgaagatcatacaaactacgagctcgttattaaagaatcgcggacgttaaaacctgaaggctttgtggtaaaagcaaaatcgaaaggcattccgcttggcggtattccttcacctagcactgaacagtctgctaaaaaagtacgcaaaaaggcagaaaacgctcataatacgccgctgcttgtgctatacggttcaaatgcgggaacagctgaaggaacggcgcgtgatttagcagatattgcaatgagcaaaggatttgcaccgcaggtcgcaacgcttgattcacacgccggtaatcttccgcgcgaaggagctgtattaattgtaacggcgtcttataacggtcatccgcctgataacgcaaagcaatttgtcgattggttagaccaagcgtctgcggatgaagtaaaaggcgttcgctactccgtatttggatgcggcgataaaaattgggcggggacgtatcaaaaagtgcctgcttttatcgatgaaacgcttgccgctaaaggggcagaaaacatcgctaagcgcggtgaagcagatgcaagcgacgactttgaaggcgcgtatgaagtgtggcgtgatcatatgtggagtgacgtagcagcctactttggtctcgacattgaaaacagtgaagataataaatctactctttcacttcaatttgtcgacagcgcggcggatatgcctcttgcgaaaatgcacggtgcgttttcaacgaacgtcgtagcaagcaaagaacttcaacagcctggcagtgcacgaagcacgcgacatcttgaaattgaacttccaaaagaagcttcttatcaagaaggagatcatttaggtgttattcctcgctattatgaaggaatagtaaaccgtgtaacacagaggttcggcctaagcgcatcacagctgatccgtctggaagcagaagaagaaaaattagctcatttgccactcgctaaaacagtatccgtagaagagcttctgcaatacgtggagcttcaagatcctgttacgcgcacgcagcttcgcgcaatggctgctaaaacggtctgcccgccgcataaagtagagcttgaagccttgcttggcaagcaagcctacaaagaacaagtgctggcaaaacgtttaacaatgcttgaactgcttgaaaaatacccggcgtgtgaaatgagtttcagcgaatttatcgcccttctgccaagcatacgcccgcgctattactcgatttcttcatcacctcgtgtcgatctgaaacaagcaagcatcacggtcagcgttgtcagcggaccggcgtggagcggatatggagaatataaaggaattgcgtcgaactatcttgctgagctgcaagaaggagatacgattacgtgctttatttccacaccgcagtcagagtttacgctgccaaaagaccctgaaacgccgcttatcatggtcggaccgggaacaggcgtcgcgccgtttagaggctttgtgcaggcgcgcaaacagctaaaagaacaaggacagtcacttggagaagcacatttatacttcggctgccgttcacctcatgaagactatctgtatcaagaagagcttgaaaacgcccaaagcgaaggcatcattctgcttcataccgctttttctcgcatgccgaatcagccgaaaacatacgttcagcacgtaatggaacaagacggcaagaaattgattgaacttcttgatcaaggagcgcacttctatatttgcggagacggaattcaaatggcacctgccgttgaagcaacgcttatgaaaagctatgctgacgttcaccaagtgagtgaagcagacgctcgcttatggctgcagcagctagaagaaaaaggccgatacgcaaaagacgtgtggctgggg

SEQ ID NO: 1238 - protein, 1049 aa, synthetic construct
  REGION 1..1049: note = variant of P450 oxidase from Bacillus megaterium
MTIKEMPQPKTFGELKNLPLLNTDKPVQALMRIADELGEIFKFEAPGSVTRYLSSQRLIKEACDESRFDKNLSQGLKFARDFVGDGLVTSWTHEPNWKKAHNILVPSFSQHAMGRYHAMMVDIAVQLVQKWERLNADEHIEVSEDMTRLTLDTIGLCLFNYRFNSFYRDTPHPFIVSVVRALDEVMNKLQRANPDDPAYDENKRQCQEDIKVMNDYVDKIIADRKARGEQSHDLLTQMLNGKDPETGEPLDDGNIRQQIITFLIAGHQTTSGLLSFALYFLVKNPRVLQKVAEEAARVLVDPVPSYKQVKQLKYVGMVLNEALRLWPVAPMFSLYAKEDTVLGGEYPLTKGDEVMVLVPQLHRDKTIWGDDVEEFRPERFENPSAIPQHAFKPFGNGQRACIGQQFALHSATLVLGMMLKHFDFEDHTNYELVIKESRTLKPEGFVVKAKSKGIPLGGIPSPSTEQSAKKVRKKAENAHNTPLLVLYGSNAGTAEGTARDLADIAMSKGFAPQVATLDSHAGNLPREGAVLIVTASYNGHPPDNAKQFVDWLDQASADEVKGVRYSVFGCGDKNWAGTYQKVPAFIDETLAAKGAENIAKRGEADASDDFEGAYEVWRDHMWSDVAAYFGLDIENSEDNKSTLSLQFVDSAADMPLAKMHGAFSTNVVASKELQQPGSARSTRHLEIELPKEASYQEGDHLGVIPRYYEGIVNRVTQRFGLSASQLIRLEAEEEKLAHLPLAKTVSVEELLQYVELQDPVTRTQLRAMAAKTVCPPHKVELEALLGKQAYKEQVLAKRLTMLELLEKYPACEMSFSEFIALLPSIRPRYYSISSSPRVDLKQASITVSVVSGPAWSGYGEYKGIASNYLAELQEGDTITCFISTPQSEFTLPKDPETPLIMVGPGTGVAPFRGFVQARKQLKEQGQSLGEAHLYFGCRSPHEDYLYQEELENAQSEGIILLHTAFSRMPNQPKTYVQHVMEQDGKKLIELLDQGAHFYICGDGIQMAPAVEATLMKSYADVHQVSEADARLWLQQLEEKGRYAKDVWLG

SEQ ID NO: 1239 - DNA, 3147 bp, synthetic construct
  misc_feature 1..3147: note = variant of P450 oxidase from Bacillus megaterium
  source 1..3147: mol_type = other DNA
atgacaattaaggaaatgcctcagcctaagacgtttggagaacttaaaaatttaccgttattaaatacagataaaccggttcaagctttgatgcgtattgcggatgaattaggagaaatctttaaattcgaggcgcctggtagcgtaacgcgctatttatcaagtcagcgtctaattaaagaagcatgcgatgaatcacgctttgataaaaacttaagtcaagggcttaaatttgcacgtgattttgttggagacgggctggttacaagctggacgcatgaaccgaattggaaaaaagcgcataatatcttagttccaagctttagtcagcatgcaatggggcgttatcatgcgatgatggtcgatatcgccgtgcagcttgttcaaaagtgggagcgtctaaatgcagatgagcatattgaagtatcggaagacatgacacgtttaacgcttgatacaattggtctttgcctgtttaactatcgctttaacagcttttaccgagatacgcctcatccatttattgtgagtgtggttcgtgcactggatgaagtaatgaacaagctgcagcgagcaaatccagacgacccagcttatgatgaaaacaagcgccagtgtcaagaagatatcaaggtgatgaacgactatgtagataaaattattgcagatcgcaaagcaaggggtgaacaaagtcatgatttattaacgcagatgctaaacggaaaagatccagaaacgggtgagccgcttgatgacgggaacattcgtcagcaaattattacattcttaattgcgggacaccaaacgacaagtggtcttttatcatttgcgctgtatttcttagtgaaaaatccacgtgtattacaaaaagtagcagaagaagcagcacgagttctagtagatcctgttccaagctacaaacaagtcaaacagcttaaatatgttggcatggtcttaaacgaagcgctgcgcttatggccagtagcgcctatgttttccctatatgcaaaagaagatacggtgcttggaggagaatatcctttaacgaaaggcgacgaagtaatggttctggtgcctcagcttcaccgtgataaaacaatttggggagacgatgtggaggagttccgtccagagcgttttgaaaatccaagtgcgattccgcagcatgcgtttaaaccgtttggaaacggtcagcgtgcgtgtatcggtcagcagttcgctcttcatagtgcaacgctggtacttggtatgatgctaaaacactttgactttgaagatcatacaaactacgagctcgttattaaagaatcgcggacgttaaaacctgaaggctttgtggtaaaagcaaaatcgaaaggcattccgcttggcggtattccttcacctagcactgaacagtctgctaaaaaagtacgcaaaaaggcagaaaacgctcataatacgccgctgcttgtgctatacggttcaaatgcgggaacagctgaaggaacggcgcgtgatttagcagatattgcaatgagcaaaggatttgcaccgcaggtcgcaacgcttgattcacacgccggtaatcttccgcgcgaaggagctgtattaattgtaacggcgtcttataacggtcatccgcctgataacgcaaagcaatttgtcgattggttagaccaagcgtctgcggatgaagtaaaaggcgttcgctactccgtatttggatgcggcgataaaaattgggcggggacgtatcaaaaagtgcctgcttttgtggatgaaacgcttgccgctaaaggggcagaaaacatcgctaagcgcggtgaagcagatgcaagcgacgactttgaaggcgcgtatgaagaatggcgtgatcatatgtggagtgacgtagcagcctactttggtctcgacattgaaaacagtgaagataataaatctactctttcacttcaatttgtcgacagcgcggcggatatgcctcttgcgaaaatgcacggtgcgttttcaacgaacgtcgtagcaagcaaagaacttcaacagcctggcagtgcacgaagcacgcgacatcttgaaattgaacttccaaaagaagcttcttatcaagaaggagatcatttaggtgttattcctcgctattatgaaggaatagtaaaccgtgtaacacagaggttcggcctaagcgcatcacagctgatccgtctggaagcagaagaagaaaaattagctcatttgccactcgctaaaacagtatccgtagaagagcttctgcaatacgtggagcttcaagatcctgttacgcgcacgcagcttcgcgcaatggctgctaaaacggtctgcccgccgcataaagtagagcttgaagccttgcttggcaagcaagcctacaaagaacaagtgctggcaaaacgtttaacaatgcttgaactgcttgaaaaatacccggcgtgtgaaatgagtttcagcgaatttatcgcccttctgccaagcatacgcccgcgctattactcgatttcttcatcacctcgtgtcgatctgaaacaagcaagcatcacggtcagcgttgtcagcggaccggcgtggagcggatatggagaatataaaggaattgcgtcgaactatcttgctgagctgcaagaaggagatacgattacgtgctttatttccacaccgcagtcagagtttacgctgccaaaagaccctgaaacgccgcttatcatggtcggaccgggaacaggcgtcgcgccgtttagaggctttgtgcaggcgcgcaaacagctaaaagaacaaggacagtcacttggagaagcacatttatacttcggctgccgttcacctcatgaagactatctgtatcaagaagagcttgaaaacgcccaaagcgaaggcatcattctgcttcataccgctttttctcgcatgccgaatcagccgaaaacatacgttcagcacgtaatggaacaagacggcaagaaattgattgaacttcttgatcaaggagcgcacttctatatttgcggagacggaattcaaatggcacctgccgttgaagcaacgcttatgaaaagctatgctgacgttcaccaagtgagtgaagcagacgctcgcttatggctgcagcagctagaagaaaaaggccgatacgcaaaagacgtgtggctgggg

SEQ ID NO: 1240 - protein, 1049 aa, synthetic construct
  REGION 1..1049: note = variant of P450 oxidase from Bacillus megaterium
MTIKEMPQPKTFGELKNLPLLNTDKPVQALMRIADELGEIFKFEAPGSVTRYLSSQRLIKEACDESRFDKNLSQGLKFARDFVGDGLVTSWTHEPNWKKAHNILVPSFSQHAMGRYHAMMVDIAVQLVQKWERLNADEHIEVSEDMTRLTLDTIGLCLFNYRFNSFYRDTPHPFIVSVVRALDEVMNKLQRANPDDPAYDENKRQCQEDIKVMNDYVDKIIADRKARGEQSHDLLTQMLNGKDPETGEPLDDGNIRQQIITFLIAGHQTTSGLLSFALYFLVKNPRVLQKVAEEAARVLVDPVPSYKQVKQLKYVGMVLNEALRLWPVAPMFSLYAKEDTVLGGEYPLTKGDEVMVLVPQLHRDKTIWGDDVEEFRPERFENPSAIPQHAFKPFGNGQRACIGQQFALHSATLVLGMMLKHFDFEDHTNYELVIKESRTLKPEGFVVKAKSKGIPLGGIPSPSTEQSAKKVRKKAENAHNTPLLVLYGSNAGTAEGTARDLADIAMSKGFAPQVATLDSHAGNLPREGAVLIVTASYNGHPPDNAKQFVDWLDQASADEVKGVRYSVFGCGDKNWAGTYQKVPAFVDETLAAKGAENIAKRGEADASDDFEGAYEEWRDHMWSDVAAYFGLDIENSEDNKSTLSLQFVDSAADMPLAKMHGAFSTNVVASKELQQPGSARSTRHLEIELPKEASYQEGDHLGVIPRYYEGIVNRVTQRFGLSASQLIRLEAEEEKLAHLPLAKTVSVEELLQYVELQDPVTRTQLRAMAAKTVCPPHKVELEALLGKQAYKEQVLAKRLTMLELLEKYPACEMSFSEFIALLPSIRPRYYSISSSPRVDLKQASITVSVVSGPAWSGYGEYKGIASNYLAELQEGDTITCFISTPQSEFTLPKDPETPLIMVGPGTGVAPFRGFVQARKQLKEQGQSLGEAHLYFGCRSPHEDYLYQEELENAQSEGIILLHTAFSRMPNQPKTYVQHVMEQDGKKLIELLDQGAHFYICGDGIQMAPAVEATLMKSYADVHQVSEADARLWLQQLEEKGRYAKDVWLG

SEQ ID NO: 1241 - DNA, 3147 bp, synthetic construct
  misc_feature 1..3147: note = variant of P450 oxidase from Bacillus megaterium
  source 1..3147: mol_type = other DNA
atgacaattaaggaaatgcctcagcctaagacgtttggagaacttaaaaatttaccgttattaaatacagataaaccggttcaagctttgatgcgtattgcggatgaattaggagaaatctttaaattcgaggcgcctggtagcgtaacgcgctatttatcaagtcagcgtctaattaaagaagcatgcgatgaatcacgctttgataaaaacttaagtcaagggcttaaatttgcacgtgattttgttggagacgggctggttacaagctggacgcatgaaccgaattggaaaaaagcgcataatatcttagttccaagctttagtcagcgcgcaatggggcgttatcatgcgatgatggtcgatatcgccgtgcagcttgttcaaaagtgggagcgtctaaatgcagatgagcatattgaagtatcggaagacatgacacgtttaacgcttgatacaattggtctttgcctgtttaactatcgctttaacagcttttaccgagatacgcctcatccatttattgtgagtgtggttcgtgcactggatgaagtaatgaacaagctgcagcgagcaaatccagacgacccagcttatgatgaaaacaagcgccagtgtcaagaagatatcaaggtgatgaacgactatgtagataaaattattgcagatcgcaaaaacaggggtgaacaaagtcatgatttattaacccagatgctaaacggaaaagatccagaaacgggtgagccgcttgatgacgggaatattcgtcagcaaattattacattcttaattgcgggacaccaaacgacaagtggtcttttatcatttgcgctgtatttcttagtgaaaaatccacgtgtattacaaaaagtagcagaagaagcagcacgagttctagtagatcctgttccaagctacaaacaagtcaaacagcttaaatatgttggcatggtcttaaacgaagcgctgcgcttatggccagtagcgcctatgttttccctatatgcaaaagaagatacggtgcttggaggagaatatcctttaacgaaaggcgacgaagtaatggttctggtgcctcagcttcaccgtgataaaacaatttggggagacgatgtggaggagttccgtccagagcgttttgaaaatccaagtgcgattccgcagcatgcgtttaaaccgtttggaaacggtcagcgtgcgtgtatcggtcagcagttcgctcttcatagtgcaacgctggtacttggtatgatgctaaaacactttgactttgaagatcatacaaactacgagctcgttattaaagaatcgcggacgttaaaacctgaaggctttgtggtaaaagcaaaatcgaaaggcattccgcttggcggtattccttcacctagcactgaacagtctgctaaaaaagtacgcaaaaaggcagaaaacgctcataatacgccgctgcttgtgctatacggttcaaatgcgggaacagctgaaggaacggcgcgtgatttagcagatattgcaatgagcaaaggatttgcaccgcaggtcgcaacgcttgattcacacgccggtaatcttccgcgcgaaggagctgtattaattgtaacggcgtcttataacggtcatccgcctgataacgcaaagcaatttgtcgattggttagaccaagcgtctgcggatgaagtaaaaggcgttcgctactccgtatttggatgcggcgataaaaattgggcggggacgtatcaaaaagtgcctgcttttatcgatgaaacgcttgccgctaaaggggcagaaaacatcgctaagcgcggtgaagcagatgcaagcgacgactttgaaggcgcgtatgaagaatggcgtgatcatatgtggagtgacgtagcagcctactttggtctcgacattgaaaacagtgaagataataaatctactctttcacttcaatttgtcgacagcgcggcggatatgcctcttgcgaaaatgcacggtgcgttttcaacgaacgtcgtagcaagcaaagaacttcaacagcctggcagtgcacgaagcacgcgacatcttgaaattgaacttccaaaagaagcttcttatcaagaaggagatcatttaggtgttattcctcgctattatgaaggaatagtaaaccgtgtaacacagaggttcggcctaagcgcatcacagctgatccgtctggaagcagaagaagaaaaattagctcatttgccactcgctaaaacagtatccgtagaagagcttctgcaatacgtggagcttcaagatcctgttacgcgcacgcagcttcgcgcaatggctgctaaaacggtctgcccgccgcataaagtagagcttgaagccttgcttggcaagcaagcctacaaagaacaagtgctggcaaaacgtttaacaatgcttgaactgcttgaaaaatacccggcgtgtgaaatgagtttcagcgaatttatcgcccttctgccaagcatacgcccgcgctattactcgatttcttcatcacctcgtgtcgatctgaaacaagcaagcatcacggtcagcgttgtcagcggaccggcgtggagcggatatggagaatataaaggaattgcgtcgaactatcttgctgagctgcaagaaggagatacgattacgtgctttatttccacaccgcagtcagagtttacgctgccaaaagaccctgaaacgccgcttatcatggtcggaccgggaacaggcgtcgcgccgtttagaggctttgtgcaggcgcgcaaacagctaaaagaacaaggacagtcacttggagaagcacatttatacttcggctgccgttcacctcatgaagactatctgtatcaagaagagcttgaaaacgcccaaagcgaaggcatcattctgcttcataccgctttttctcgcatgccgaatcagccgaaaacatacgttcagcacgtaatggaacaagacggcaagaaattgattgaacttcttgatcaaggagcgcacttctatatttgcggagacggaattcaaatggcacctgccgttgaagcaacgcttatgaaaagctatgctgacgttcaccaagtgacggaagcagacgctcgcttatggctgcagcagctagaagaaaaaggccgatacgcaaaagacgtgtggctgggg

SEQ ID NO: 1242 - protein, 1049 aa, synthetic construct
  REGION 1..1049: note = variant of P450 oxidase from Bacillus megaterium
MTIKEMPQPKTFGELKNLPLLNTDKPVQALMRIADELGEIFKFEAPGSVTRYLSSQRLIKEACDESRFDKNLSQGLKFARDFVGDGLVTSWTHEPNWKKAHNILVPSFSQRAMGRYHAMMVDIAVQLVQKWERLNADEHIEVSEDMTRLTLDTIGLCLFNYRFNSFYRDTPHPFIVSVVRALDEVMNKLQRANPDDPAYDENKRQCQEDIKVMNDYVDKIIADRKNRGEQSHDLLTQMLNGKDPETGEPLDDGNIRQQIITFLIAGHQTTSGLLSFALYFLVKNPRVLQKVAEEAARVLVDPVPSYKQVKQLKYVGMVLNEALRLWPVAPMFSLYAKEDTVLGGEYPLTKGDEVMVLVPQLHRDKTIWGDDVEEFRPERFENPSAIPQHAFKPFGNGQRACIGQQFALHSATLVLGMMLKHFDFEDHTNYELVIKESRTLKPEGFVVKAKSKGIPLGGIPSPSTEQSAKKVRKKAENAHNTPLLVLYGSNAGTAEGTARDLADIAMSKGFAPQVATLDSHAGNLPREGAVLIVTASYNGHPPDNAKQFVDWLDQASADEVKGVRYSVFGCGDKNWAGTYQKVPAFIDETLAAKGAENIAKRGEADASDDFEGAYEEWRDHMWSDVAAYFGLDIENSEDNKSTLSLQFVDSAADMPLAKMHGAFSTNVVASKELQQPGSARSTRHLEIELPKEASYQEGDHLGVIPRYYEGIVNRVTQRFGLSASQLIRLEAEEEKLAHLPLAKTVSVEELLQYVELQDPVTRTQLRAMAAKTVCPPHKVELEALLGKQAYKEQVLAKRLTMLELLEKYPACEMSFSEFIALLPSIRPRYYSISSSPRVDLKQASITVSVVSGPAWSGYGEYKGIASNYLAELQEGDTITCFISTPQSEFTLPKDPETPLIMVGPGTGVAPFRGFVQARKQLKEQGQSLGEAHLYFGCRSPHEDYLYQEELENAQSEGIILLHTAFSRMPNQPKTYVQHVMEQDGKKLIELLDQGAHFYICGDGIQMAPAVEATLMKSYADVHQVTEADARLWLQQLEEKGRYAKDVWLG

SEQ ID NO: 1243 - DNA, 3147 bp, synthetic construct
  misc_feature 1..3147: note = variant of P450 oxidase from Bacillus megaterium
  source 1..3147: mol_type = other DNA
atgacaattaaggaaatgcctcagcctaagacgtttggagaacttaaaaatttaccgttattaaatacagataaaccggttcaagctttgatgcgtattgcggatgaattaggagaaatctttaaattcgaggcgcctggtagcgtaacgcgctatttatcaagtcagcgtctaattaaagaagcatgcgatgaatcacgctttgataaaaacttaagtcaagggcttaaatttgcacgtgattttgttggagacgggctggttacaagctggacgcatgaaccgaattggaaaaaagcgcataatatcttagttccaagctttagtcagcgcgcaatggggcgttatcatgcgatgatggtcgatatcgccgtgcagcttgttcaaaagtgggggcgtctaaatgcagatgagcatattgaagtatcggaagacatgacacgtttaacgcttgatacaattggtctttgcctgtttaactatcgctttaacagcttttaccgagatacgcctcatccatttattgtgagtgtggttcgtgcactggatgaagtaatgaacaagctgcagcgagcaaatccagacgacccagcttatgatgaaaacaagcgccagtgtcaagaagatatcaaggtgatgaacgactatgtagataaaattattgcagatcgcaaaaacaggggtgaacaaagtcatgatttattaacccagatgctaaacggaaaagatccagaaacgggtgagccgcttgatgacgggaatattcgtcagcaaattattacattcttaattgcgggacaccaaacgacaagtggtcttttatcatttgcgctgtatttcttagtgaaaaatccacgtgtattacaaaaggtagcagaagaagcagcacgagttctagtagatcctgttccaagctacaaacaagtcaaacagcttaaatatgttggcatggtcttaaacgaagcgctgcgcttatggccagtagcgcctatgttttccctatatgcaaaagaagatacggtgcttggaggagaatatcctttaacgaaaggcgacgaagtaatggttctggtgcctcagcttcaccgtgataaaacaatttggggagacgatgtggaggagttccgtccagagcgttttgaaaatccaagtgcgattccgcagcatgcgtttaaaccgtttggaaacggtcagcgtgcgtgtatcggtcagcagttcgctcttcatagtgcaacgctggtacttggtatgatgctaaaacactttgactttgaagatcatacaaactacgagctcgtcattaaagaatcgcggacgttaaaacctgaaggctttgtggtaaaagcaaaatcgaaaggcattccgcttggcggtattccttcaccttcgactgaacagagttttaaaaaagtacgcaaaaaggcagaaaacgctcataatacgccgctgcttgtgctatacggttcaaatgcgggaacagctgaaggaacggcgcgtgatttagcagatattgcaatgagcaaaggatttgcaccgcaggtcgcaacgcttgattcacacgccggtaatcttccgcgcgaaggagctgtattaattgtaacggcgtcttataacggtcatccgcctgataacgcaaagcaatttgtcgattggttagaccaagcgtctgcggatgaagtaaaaggcgttcgctactccgtatttggatgcggcgataaaaattgggcggggacgtatcaaaaagtgcctgcttttatcgatgaaacgcttgccgctaaaggggcagaaaacatcgctaagcgcggtgaagcagatgcaagcgacgactttgaaggcgcgtatgaagaatggcgtgatcatatgtggagtgacgtagcagcctactttggtctcgacattgaaaacagtgaagataataaatctactctttcacttcaatttgtcgacagcgcggcggatatgcctcttgcgaaaatgcacggtgcgttttcaacgaacgtcgtagcaagcaaagaacttcaacagcctggcagtgcacgaagcacgcgacatcttgaaattgaacttccaaaagaagcttcttatcaagaaggagatcatttaggtgttattcctcgctattatgaaggaatagtaaaccgtgtaacacagaggttcggcctaagcgcatcacagctgatccgtctggaagcagaagaagaaaaattagctcatttgccactcgctaaaacagtatccgtagaagagcttctgcaatacgtggagcttcaagatcctgttacgcgcacgcagcttcgcgcaatggctgctaaaacggtctgcccgccgcataaagtagagcttgaagccttgcttggcaagcaagcctataaagaaacggtgctggcaaaacgtttaacaatgcttgaactgcttgaaaaatacccggcgtgtgaaatgagtttcagcgaatttatcgcccttctgccaagcatacgcccgcgctattactcgatttcttcatcacctcgtgtcgatctgaaacaagcaagcatcacggtcagcgttgtcagcggaccggcgtggagcggatatggagaatataaaggaattgcgtcgaactatcttgctgagctgcaagaaggagatacgattacgtgctttatttccacaccgcagtcagagtttacgctgccaaaagaccctgaaacgccgcttatcatggtcggaccgggaacaggcgtcgcgccgtttagaggctttgtgcaggcgcgcaaacagctaaaagaacaaggacagtcacttggagaagcacatttatacttcggctgccgttcaccccatgaagactatctgtatcaagaagagcttgaaaacgcccaaagcgaaggcatcattctgcttcataccgctttttctcgcatgccgaatcagccgaaaacatacgttcagcacgtaatggaacaagacggcaagaaattgattgaacttcttgatcaaggagcgcacttctatatttgcggagacggaattcaaatggcacctgccgttgaagcaacgcttatgaaaagctatgctgacgttcaccaagtgtcggaagcagacgctcgcttatggctgcagcagctagaagaaaaaggccgatacgcaaaagacgtgtggctgggg

SEQ ID NO: 1244 - protein, 1049 aa, synthetic construct
  REGION 1..1049: note = variant of P450 oxidase from Bacillus megaterium
MTIKEMPQPKTFGELKNLPLLNTDKPVQALMRIADELGEIFKFEAPGSVTRYLSSQRLIKEACDESRFDKNLSQGLKFARDFVGDGLVTSWTHEPNWKKAHNILVPSFSQRAMGRYHAMMVDIAVQLVQKWGRLNADEHIEVSEDMTRLTLDTIGLCLFNYRFNSFYRDTPHPFIVSVVRALDEVMNKLQRANPDDPAYDENKRQCQEDIKVMNDYVDKIIADRKNRGEQSHDLLTQMLNGKDPETGEPLDDGNIRQQIITFLIAGHQTTSGLLSFALYFLVKNPRVLQKVAEEAARVLVDPVPSYKQVKQLKYVGMVLNEALRLWPVAPMFSLYAKEDTVLGGEYPLTKGDEVMVLVPQLHRDKTIWGDDVEEFRPERFENPSAIPQHAFKPFGNGQRACIGQQFALHSATLVLGMMLKHFDFEDHTNYELVIKESRTLKPEGFVVKAKSKGIPLGGIPSPSTEQSFKKVRKKAENAHNTPLLVLYGSNAGTAEGTARDLADIAMSKGFAPQVATLDSHAGNLPREGAVLIVTASYNGHPPDNAKQFVDWLDQASADEVKGVRYSVFGCGDKNWAGTYQKVPAFIDETLAAKGAENIAKRGEADASDDFEGAYEEWRDHMWSDVAAYFGLDIENSEDNKSTLSLQFVDSAADMPLAKMHGAFSTNVVASKELQQPGSARSTRHLEIELPKEASYQEGDHLGVIPRYYEGIVNRVTQRFGLSASQLIRLEAEEEKLAHLPLAKTVSVEELLQYVELQDPVTRTQLRAMAAKTVCPPHKVELEALLGKQAYKETVLAKRLTMLELLEKYPACEMSFSEFIALLPSIRPRYYSISSSPRVDLKQASITVSVVSGPAWSGYGEYKGIASNYLAELQEGDTITCFISTPQSEFTLPKDPETPLIMVGPGTGVAPFRGFVQARKQLKEQGQSLGEAHLYFGCRSPHEDYLYQEELENAQSEGIILLHTAFSRMPNQPKTYVQHVMEQDGKKLIELLDQGAHFYICGDGIQMAPAVEATLMKSYADVHQVSEADARLWLQQLEEKGRYAKDVWLG

SEQ ID NO: 1245 - DNA, 3147 bp, synthetic construct
  misc_feature 1..3147: note = variant of P450 oxidase from Bacillus megaterium
  source 1..3147: mol_type = other DNA
atgacaattaaggaaatgcctcagcctaagacgtttggagaacttaaaaatttaccgttattaaatacagataaaccggttcaagctttgatgcgtattgcggatgaattaggagaaatctttaaattcgaggcgcctggtagcgtaacgcgctatttatcaagtcagcgtctaattaaagaagcatgcgatgaatcacgctttgataaaaacttaagtcaagggcttaaatttgcacgtgattttgttggagacgggctggttacaagctggacgcatgaaccgaattggaaaaaagcgcataatatcttagttccaagctttagtcagcgcgcaatggggcgttatcatgcgatgatggtcgatatcgccgtgcagcttgttcaaaagtgggagcgtctaaatgcagatgagcatattgaagtatcggaagacatgacacgtttaacgcttgatacaattggtctttgcctgtttaactatcgctttaacagcttttaccgagatacgcctcatccatttattgtgagtgtggttcgtgcactggatgaagtaatgaacaagctgcagcgagcaaatccagacgacccagcttatgatgaaaacaagcgccagtgtcaagaagatatcaaggtgatgaacgactatgtagataaaattattgcagatcgcaaaaacaggggtgaacaaagtcatgatttattaacccagatgctaaacggaaaagatccagaaacgggtgagccgcttgatgacgggaatattcgtcagcaaattattacattcttaattgcgggacaccaaacgacaagtggtcttttatcatttgcgctgtatttcttagtgaaaaatccacgtgtattacaaaaggtagcagaagaagcagcacgagttctagtagatcctgttccaagctacaaacaagtcaaacagcttaaatatgttggcatggtcttaaacgaagcgctgcgcttatggccagtagcgcctatgttttccctatatgcaaaagaagatacggtgcttggaggagaatatcctttaacgaaaggcgacgaagtaatggttctggtgcctcagcttcaccgtgataaaaccatttggggagacgatgtggaggagttccgtccagagcgttttgaaaatccaagtgcgattccgcagcatgcgtttaaaccgtttggaaacggtcagcgtgcgtgtatcggtcagcagttcgctcttcatagtgcaacgctggtacttggtatgatgctaaaacactttgactttgaagatcatacaaactacgagctcaagattaaagaatcgcggacgttaaaacctgaaggctttgtggtaaaagcaaaatcgaaaggcattccgcttggcggtattccttcaccttcgactgaacagaaagctaaaaaagtacgcaaaaaggcagaaaacgctcataatacgccgctgcttgtgctatacggttcaaatgcgggaacagctgaaggaacggcgcgtgatttagcagatattgcaatgagcaaaggatttgcaccgcaggtcgcaacgcttgattcacacgccggtaatcttccgcgcgaaggagctgtattaattgtaacggcgtcttataacggtcatccgcctgataacgcaaagcaatttgtcgattggttagaccaagcgtctgcggatgaagtaaaaggcgttcgctactccgtatttggatgcggcgataaaaattgggcggggacgtatcaaaaagtgcctgcttttatcgatgaaacgcttgccgctaaaggggcagaaaacatcgctaagcgcggtgaagcagatgcaagcgacgactttgaaggcgcgtatgaagaatggcgtgatcatatgtggagtgacgtagcagcctactttggtctcgacattgaaaacagtgaagataataaatctactctttcacttcaatttgtcgacagcgcggcggatatgcctcttgcgaaaatgcacggtgcgttttcaacgaacgtcgtagcaagcaaagaacttcaacagcctggcagtgcacgaagcacgcgacatcttgaaattgaacttccaaaagaagcttcttatcaagaaggagatcatttaggtgttattcctcgctattatgaaggaatagtaaaccgtgtaacacagaggttcggcctaagcgcatcacagctgatccgtctggaagcagaagaagaaaaattagctcatttgccactcgctaaaacagtatccgtagaagagcttctgcaatacgtggagcttcaagatcctgttacgcgcacgcagcttcgcgcaatggctgctaaaacggtctgcccgccgcataaagtagagcttgaagccttgcttggcaagcaagcctacaaagaacaagtgctggcaaaacgtttaacaatgcttgaactgcttgaaaaatacccggcgtgtgaaatgagtttcagcgaatttatcgcccttctgccaagcatacgcccgcgctattactcgatttcttcatcacctcgtgtcgatctgaaacaagcaagcatcacggtcagcgttgtcagcggaccggcgtggagcggatatggagaatataaaggaattgcgtcgaactatcttgctgagctgcaagaaggagatacgattacgtgctttatttccacaccgcagtcagagtttacgctgccaaaagaccctgaaacgccgcttatcatggtcggaccgggaacaggcgtcgcgccgtttagaggctttgtgcaggcgcgcaaacagctaaaagaacaaggacagtcacttggagaagcacatttatacttcggctgccgttcacctcatgaagactatctgtatcaagaagagcttgaaaacgcccaaagcgaaggcatcattctgcttcataccgctttttctcgcatgccgaatcagccgaaaacatacgttcagcacgtaatggaacaagacggcaagaaattgattgaacttcttgatcaaggagcgcacttctatatttgcggagacggaattcaaatggcacctgccgttgaagcaacgcttatgaaaagctatgctgacgttcaccaagtgacggaagcagacgctcgcttatggctgcagcagctagaagaaaaaggccgatacgcaaaagacgtgtggctgggg

SEQ ID NO: 1246 - protein, 1049 aa, synthetic construct
  REGION 1..1049: note = variant of P450 oxidase from Bacillus megaterium
MTIKEMPQPKTFGELKNLPLLNTDKPVQALMRIADELGEIFKFEAPGSVTRYLSSQRLIKEACDESRFDKNLSQGLKFARDFVGDGLVTSWTHEPNWKKAHNILVPSFSQRAMGRYHAMMVDIAVQLVQKWERLNADEHIEVSEDMTRLTLDTIGLCLFNYRFNSFYRDTPHPFIVSVVRALDEVMNKLQRANPDDPAYDENKRQCQEDIKVMNDYVDKIIADRKNRGEQSHDLLTQMLNGKDPETGEPLDDGNIRQQIITFLIAGHQTTSGLLSFALYFLVKNPRVLQKVAEEAARVLVDPVPSYKQVKQLKYVGMVLNEALRLWPVAPMFSLYAKEDTVLGGEYPLTKGDEVMVLVPQLHRDKTIWGDDVEEFRPERFENPSAIPQHAFKPFGNGQRACIGQQFALHSATLVLGMMLKHFDFEDHTNYELKIKESRTLKPEGFVVKAKSKGIPLGGIPSPSTEQKAKKVRKKAENAHNTPLLVLYGSNAGTAEGTARDLADIAMSKGFAPQVATLDSHAGNLPREGAVLIVTASYNGHPPDNAKQFVDWLDQASADEVKGVRYSVFGCGDKNWAGTYQKVPAFIDETLAAKGAENIAKRGEADASDDFEGAYEEWRDHMWSDVAAYFGLDIENSEDNKSTLSLQFVDSAADMPLAKMHGAFSTNVVASKELQQPGSARSTRHLEIELPKEASYQEGDHLGVIPRYYEGIVNRVTQRFGLSASQLIRLEAEEEKLAHLPLAKTVSVEELLQYVELQDPVTRTQLRAMAAKTVCPPHKVELEALLGKQAYKEQVLAKRLTMLELLEKYPACEMSFSEFIALLPSIRPRYYSISSSPRVDLKQASITVSVVSGPAWSGYGEYKGIASNYLAELQEGDTITCFISTPQSEFTLPKDPETPLIMVGPGTGVAPFRGFVQARKQLKEQGQSLGEAHLYFGCRSPHEDYLYQEELENAQSEGIILLHTAFSRMPNQPKTYVQHVMEQDGKKLIELLDQGAHFYICGDGIQMAPAVEATLMKSYADVHQVTEADARLWLQQLEEKGRYAKDVWLG

SEQ ID NO: 1247 - DNA, 3147 bp, synthetic construct
  misc_feature 1..3147: note = variant of P450 oxidase from Bacillus megaterium
  source 1..3147: mol_type = other DNA
atgacaattaaggaaatgcctcagcctaagacgtttggagaacttaaaaatttaccgttattaaatacagataaaccggttcaagctttgatgcgtattgcggatgaattaggagaaatctttaaattcgaggcgcctggtagcgtaacgcgctatttatcaagtcagcgtctaattaaagaagcatgcgatgaatcacgctttgataaaaacttaagtcaagggcttaaatttgcacgtgattttgttggagacgggctggttacaagctggacgcatgaaccgaattggaaaaaagcgcataatatcttagttccaagctttagtcagcgcgcaatggggcgttatcatgcgatgatggtcgatatcgccgtgcagcttgttcaaaagtgggggcgtctaaatgcagatgagcatattgaagtatcggaagacatgacacgtttaacgcttgatacaattggtctttgcctgtttaactatcgctttaacagcttttaccgagatacgcctcatccatttattgtgagtgtggttcgtgcactggatgaagtaatgaacaagctgcagcgagcaaatccagacgacccagcttatgatgaaaacaagcgccagtgtcaagaagatatcaaggtgatgaacgactatgtagataaaattattgcagatcgcaaaaacaggggtgaacaaagtcatgatttattaacccagatgctaaacggaaaagatccagaaacgggtgagccgcttgatgacgggaatattcgtcagcaaattattacattcttaattgcgggacaccaaacgacaagtggtcttttatcatttgcgctgtatttcttagtgaaaaatccacgtgtattacaaaaggtagcagaagaagcagcacgagttctagtagatcctgttccaagctacaaacaagtcaaacagcttaaatatgttggcatggtcttaaacgaagcgctgcgcttatggccagtagcgcctatgttttccctatatgcaaaagaagatacggtgcttggaggagaatatcctttaacgaaaggcgacgaagtaatggttctggtgcctcagcttcaccgtgataaaatcatttggggagacgatgtggaggagttccgtccagagcgttttgaaaatccaagtgcgattccgcagcatgcgtttaaaccgtttggaaacggtcagcgtgcgtgtatcggtcagcagttcgctcttcatagtgcaacgctggtacttggtatgatgctaaaacactttgactttgaagatcatacaaactacgagctcaagattaaagaatcgcggacgttaaaacctgaaggctttgtggtaaaagcaaaatcgaaaggcattccgcttggcggtattccttcacctgcgactgaacagaaagctaaaaaagtacgcaaaaaggcagaaaacgctcataatacgccgctgcttgtgctatacggttcaaatgcgggaacagctgaaggaacggcgcgtgatttagcagatattgcaatgagcaaaggatttgcaccgcaggtcgcaacgcttgattcacacgccggtaatcttccgcgcgaaggagctgtattaattgtaacggcgtcttataacggtcatccgcctgataacgcaaagcaatttgtcgattggttagaccaagcgtctgcggatgaagtaaaaggcgttcgctactccgtatttggatgcggcgataaaaattgggcggggacgtatcaaaaagtgcctgcttttatcgatgaaacgcttgccgctaaaggggcagaaaacatcgctaagcgcggtgaagcagatgcaagcgacgactttgaaggcgcgtatgaagaatggcgtgatcatatgtggagtgacgtagcagcctactttggtctcgacattgaaaacagtgaagataataaatctactctttcacttcaatttgtcgacagcgcggcggatatgcctcttgcgaaaatgcacggtgcgttttcaacgaacgtcgtagcaagcaaagaacttcaacagcctggcagtgcacgaagcacgcgacatcttgaaattgaacttccaaaagaagcttcttatcaagaaggagatcatttaggtgttattcctcgctattatgaaggaatagtaaaccgtgtaacacagaggttcggcctaagcgcatcacagctgatccgtctggaagcagaagaagaaaaattagctcatttgccactcgctaaaacagtatccgtagaagagcttctgcaatacgtggagcttcaagatcctgttacgcgcacgcagcttcgcgcaatggctgctaaaacggtctgcccgccgcataaagtagagcttgaagccttgcttggcaagcaagcctataaagaaacggtgctggcaaaacgtttaacaatgcttgaactgcttgaaaaatacccggcgtgtgaaatgagtttcagcgaatttatcgcccttctgccaagcatacgcccgcgctattactcgatttcttcatcacctcgtgtcgatctgaaacaagcaagcatcacggtcagcgttgtcagcggaccggcgtggagcggatatggagaatataaaggaattgcgtcgaactatcttgctgagctgcaagaaggagatacgattacgtgctttatttccacaccgcagtcagagtttacgctgccaaaagaccctgaaacgccgcttatcatggtcggaccgggaacaggcgtcgcgccgtttagaggctttgtgcaggcgcgcaaacagctaaaagaacaaggacagtcacttggagaagcacatttatacttcggctgccgttcacctcatgaagactatctgtatcaagaagagcttgaaaacgcccaaagcgaaggcatcattctgcttcataccgctttttctcgcatgccgaatcagccgaaaacatacgttcagcacgtaatggaacaagacggcaagaaattgattgaacttcttgatcaaggagcgcacttctatatttgcggagacggaattcaaatggcacctgccgttgaagcaacgcttatgaaaagctatgctgacgttcaccaagtgtcggaagcagacgctcgcttatggctgcagcagctagaagaaaaaggccgatacgcaaaagacgtgtggctgggg

SEQ ID NO: 1248 - protein, 1049 aa, synthetic construct
  REGION 1..1049: note = variant of P450 oxidase from Bacillus megaterium
MTIKEMPQPKTFGELKNLPLLNTDKPVQALMRIADELGEIFKFEAPGSVTRYLSSQRLIKEACDESRFDKNLSQGLKFARDFVGDGLVTSWTHEPNWKKAHNILVPSFSQRAMGRYHAMMVDIAVQLVQKWGRLNADEHIEVSEDMTRLTLDTIGLCLFNYRFNSFYRDTPHPFIVSVVRALDEVMNKLQRANPDDPAYDENKRQCQEDIKVMNDYVDKIIADRKNRGEQSHDLLTQMLNGKDPETGEPLDDGNIRQQIITFLIAGHQTTSGLLSFALYFLVKNPRVLQKVAEEAARVLVDPVPSYKQVKQLKYVGMVLNEALRLWPVAPMFSLYAKEDTVLGGEYPLTKGDEVMVLVPQLHRDKIIWGDDVEEFRPERFENPSAIPQHAFKPFGNGQRACIGQQFALHSATLVLGMMLKHFDFEDHTNYELKIKESRTLKPEGFVVKAKSKGIPLGGIPSPATEQKAKKVRKKAENAHNTPLLVLYGSNAGTAEGTARDLADIAMSKGFAPQVATLDSHAGNLPREGAVLIVTASYNGHPPDNAKQFVDWLDQASADEVKGVRYSVFGCGDKNWAGTYQKVPAFIDETLAAKGAENIAKRGEADASDDFEGAYEEWRDHMWSDVAAYFGLDIENSEDNKSTLSLQFVDSAADMPLAKMHGAFSTNVVASKELQQPGSARSTRHLEIELPKEASYQEGDHLGVIPRYYEGIVNRVTQRFGLSASQLIRLEAEEEKLAHLPLAKTVSVEELLQYVELQDPVTRTQLRAMAAKTVCPPHKVELEALLGKQAYKETVLAKRLTMLELLEKYPACEMSFSEFIALLPSIRPRYYSISSSPRVDLKQASITVSVVSGPAWSGYGEYKGIASNYLAELQEGDTITCFISTPQSEFTLPKDPETPLIMVGPGTGVAPFRGFVQARKQLKEQGQSLGEAHLYFGCRSPHEDYLYQEELENAQSEGIILLHTAFSRMPNQPKTYVQHVMEQDGKKLIELLDQGAHFYICGDGIQMAPAVEATLMKSYADVHQVSEADARLWLQQLEEKGRYAKDVWLG

SEQ ID NO: 1249 - DNA, 3147 bp, synthetic construct
  misc_feature 1..3147: note = variant of P450 oxidase from Bacillus megaterium
  source 1..3147: mol_type = other DNA
atgacaattaaggaaatgcctcagcctaagacgtttggagaacttaaaaatttaccgttattaaatacagataaaccggttcaagctttgatgcgtattgcggatgaattaggagaaatctttaaattcgaggcgcctggtagcgtaacgcgctatttatcaagtcagcgtctaattaaagaagcatgcgatgaatcacgctttgataaaaacttaagtcaagggcttaaatttgcacgtgattttgttggagacgggctggttacaagctggacgcatgaaccgaattggaaaaaagcgcataatatcttagttccaagctttagtcagcgcgcaatggggcgttatcatgcgatgatggtcgatatcgccgtgcagcttgttcaaaagtgggagcgtctaaatgcagatgagcatattgaagtatcggaagacatgacacgtttaacgcttgatacaattggtctttgcctgtttaactatcgctttaacagcttttaccgagatacgcctcatccatttattgtgagtgtggttcgtgcactggatgaagtaatgaacaagctgcagcgagcaaatccagacgacccagcttatgatgaaaacaagcgccagtgtcaagaagatatcaaggtgatgaacgactatgtagataaaattattgcagatcgcaaaaacaggggtgaacaaagtcatgatttattaacccagatgctaaacggaaaagatccagaaacgggtgagccgcttgatgacgggaatattcgtcagcaaattattacattcttaattgcgggacaccaaacgacaagtggtcttttatcatttgcgctgtatttcttagtgaaaaatccacgtgtattacaaacggtagcagaagaagcagcacgagttctagtagatcctgttccaagctacaaacaagtcaaacagcttaaatatgttggcatggtcttaaacgaagcgctgcgcttatggccagtagcgcctatgttttccctatatgcaaaagaagatacggtgcttggaggagaatatcctttaacgaaaggcgacgaagtaatggttctggtgcctcagcttcaccgtgataaaacaatttggggagacgatgtggaggagttccgtccagagcgttttgaaaatccaagtgcgattccgcagcatgcgtttaaaccgtttggaaacggtcagcgtgcgtgtatcggtcagcagttcgctcttcatagtgcaacgctggtacttggtatgatgctaaaacactttgactttgaagatcatacaaactacgagctcgttattaaagaatcgcggacgttaaaacctgaaggctttgtggtaaaagcaaaatcgaaaggcattccgcttggcggtattccttcacctagcactgaacagtctgctaaaaaagtacgcaaaaaggcagaaaacgctcataatacgccgctgcttgtgctatacggttcaaatgcgggaacagctgaaggaacggcgcgtgatttagcagatattgcaatgagcaaaggatttgcaccgcaggtcgcaacgcttgattcacacgccggtaatcttccgcgcgaaggagctgtattaattgtaacggcgtcttataacggtcatccgcctgataacgcaaagcaatttgtcgattggttagaccaagcgtctgcggatgaagtaaaaggcgttcgctactccgtatttggatgcggcgataaaaattgggcggggacgtatcaaaaagtgcctgcttttatcgatgaaacgcttgccgctaaaggggcagaaaacatcgctaagcgcggtgaagcagatgcaagcgacgactttgaaggcgcgtatgaagaatggcgtgatcatatgtggagtgacgtagcagcctactttggtctcgacattgaaaacagtgaagataataaatctactctttcacttcaatttgtcgacagcgcggcggatatgcctcttgcgaaaatgcacggtgcgttttcaacgaacgtcgtagcaagcaaagaacttcaacagcctggcagtgcacgaagcacgcgacatcttgaaattgaacttccaaaagaagcttcttatcaagaaggagatcatttaggtgttattcctcgctattatgaaggaatagtaaaccgtgtaacacagaggttcggcctaagcgcatcacagctgatccgtctggaagcagaagaagaaaaattagctcatttgccactcgctaaaacagtatccgtagaagagcttctgcaatacgtggagcttcaagatcctgttacgcgcacgcagcttcgcgcaatggctgctaaaacggtctgcccgccgcataaagtagagcttgaagccttgcttggcaagcaagcctacaaagaacaagtgctggcaaaacgtttaacaatgcttgaactgcttgaaaaatacccggcgtgtgaaatgagtttcagcgaatttatcgcccttctgccaagcatacgcccgcgctattactcgatttcttcatcacctcgtgtcgatctgaaacaagcaagcatcacggtcagcgttgtcagcggaccggcgtggagcggatatggagaatataaaggaattgcgtcgaactatcttgctgagctgcaagaaggagatacgattacgtgctttatttccacaccgcagtcagagtttacgctgccaaaagaccctgaaacgccgcttatcatggtcggaccgggaacaggcgtcgcgccgtttagaggctttgtgcaggcgcgcaaacagctaaaagaacaaggacagtcacttggagaagcacatttatacttcggctgccgttcacctcatgaagactatctgtatcaagaagagcttgaaaacgcccaaagcgaaggcatcattctgcttcataccgctttttctcgcatgccgaatcagccgaaaacatacgttcagcacgtaatggaacaagacggcaagaaattgattgaacttcttgatcaaggagcgcacttctatatttgcggagacggaattcaaatggcacctgccgttgaagcaacgcttatgaaaagctatgctgacgttcaccaagtgacggaagcagacgctcgcttatggctgcagcagctagaagaaaaaggccgatacgcaaaagacgtgtggctgggg

SEQ ID NO: 1250 - protein, 1049 aa, synthetic construct
  REGION 1..1049: note = variant of P450 oxidase from Bacillus megaterium
MTIKEMPQPKTFGELKNLPLLNTDKPVQALMRIADELGEIFKFEAPGSVTRYLSSQRLIKEACDESRFDKNLSQGLKFARDFVGDGLVTSWTHEPNWKKAHNILVPSFSQRAMGRYHAMMVDIAVQLVQKWERLNADEHIEVSEDMTRLTLDTIGLCLFNYRFNSFYRDTPHPFIVSVVRALDEVMNKLQRANPDDPAYDENKRQCQEDIKVMNDYVDKIIADRKNRGEQSHDLLTQMLNGKDPETGEPLDDGNIRQQIITFLIAGHQTTSGLLSFALYFLVKNPRVLQTVAEEAARVLVDPVPSYKQVKQLKYVGMVLNEALRLWPVAPMFSLYAKEDTVLGGEYPLTKGDEVMVLVPQLHRDKTIWGDDVEEFRPERFENPSAIPQHAFKPFGNGQRACIGQQFALHSATLVLGMMLKHFDFEDHTNYELVIKESRTLKPEGFVVKAKSKGIPLGGIPSPSTEQSAKKVRKKAENAHNTPLLVLYGSNAGTAEGTARDLADIAMSKGFAPQVATLDSHAGNLPREGAVLIVTASYNGHPPDNAKQFVDWLDQASADEVKGVRYSVFGCGDKNWAGTYQKVPAFIDETLAAKGAENIAKRGEADASDDFEGAYEEWRDHMWSDVAAYFGLDIENSEDNKSTLSLQFVDSAADMPLAKMHGAFSTNVVASKELQQPGSARSTRHLEIELPKEASYQEGDHLGVIPRYYEGIVNRVTQRFGLSASQLIRLEAEEEKLAHLPLAKTVSVEELLQYVELQDPVTRTQLRAMAAKTVCPPHKVELEALLGKQAYKEQVLAKRLTMLELLEKYPACEMSFSEFIALLPSIRPRYYSISSSPRVDLKQASITVSVVSGPAWSGYGEYKGIASNYLAELQEGDTITCFISTPQSEFTLPKDPETPLIMVGPGTGVAPFRGFVQARKQLKEQGQSLGEAHLYFGCRSPHEDYLYQEELENAQSEGIILLHTAFSRMPNQPKTYVQHVMEQDGKKLIELLDQGAHFYICGDGIQMAPAVEATLMKSYADVHQVTEADARLWLQQLEEKGRYAKDVWLG

SEQ ID NO: 1251 - DNA, 3147 bp, synthetic construct
  misc_feature 1..3147: note = variant of P450 oxidase from Bacillus megaterium
  source 1..3147: mol_type = other DNA
atgacaattaaggaaatgcctcagcctaagacgtttggagaacttaaaaatttaccgttattaaatacagataaaccggttcaagctttgatgcgtattgcggatgaattaggagaaatctttaaattcgaggcgcctggtagcgtaacgcgctatttatcaagtcagcgtctaattaaagaagcatgcgatgaatcacgctttgataaaaacttaagtcaagggcttaaatttgcacgtgattttgttggagacgggctggttacaagctggacgcatgaaccgaattggaaaaaagcgcataatatcttagttccaagctttagtcagcgcgcaatggggcgttatcatgcgatgatggtcgatatcgccgtgcagcttgttcaaaagtgggagcgtctaaatgcagatgagcatattgaagtatcggaagacatgacacgtttaacgcttgatacaattggtctttgcctgtttaactatcgctttaacagcttttaccgagatacgcctcatccatttattgtgagtgtggttcgtgcactggatgaagtaatgaacaagctgcagcgagcaaatccagacgacccagcttatgatgaaaacaagcgccagtgtcaagaagatatcaaggtgatgaacgactatgtagataaaattattgcagatcgcaaaaacaggggtgaacaaagtcatgatttattaacccagatgctaaacggaaaagatccagaaacgggtgagccgcttgatgacgggaatattcgtcagcaaattattacattcttaattgcgggacaccaaacgacaagtggtcttttatcatttgcgctgtatttcttagtgaaaaatccacgtgtattacaaacggtagcagaagaagcagcacgagttctagtagatcctgttccaagctacaaacaagtcaaacagcttaaatatgttggcatggtcttaaacgaagcgctgcgcttatggccagtagcgcctatgttttccctatatgcaaaagaagatacggtgcttggaggagaatatcctttaacgaaaggcgacgaagtaatggttctggtgcctcagcttcaccgtgataaaatcatttggggagacgatgtggaggagttccgtccagagcgttttgaaaatccaagtgcgattccgcagcatgcgtttaaaccgtttggaaacggtcagcgtgcgtgtatcggtcagcagttcgctcttcatagtgcaacgctggtacttggtatgatgctaaaacactttgactttgaagatcatacaaactacgagctcaagattaaagaatcgcggacgttaaaacctgaaggctttgtggtaaaagcaaaatcgaaaggcattccgcttggcggtattccttcacctgcgactgaacagaaagctaaaaaagtacgcaaaaaggcagaaaacgctcataatacgccgctgcttgtgctatacggttcaaatgcgggaacagctgaaggaacggcgcgtgatttagcagatattgcaatgagcaaaggatttgcaccgcaggtcgcaacgcttgattcacacgccggtaatcttccgcgcgaaggagctgtattaattgtaacggcgtcttataacggtcatccgcctgataacgcaaagcaatttgtcgattggttagaccaagcgtctgcggatgaagtaaaaggcgttcgctactccgtatttggatgcggcgataaaaattgggcggggacgtatcaaaaagtgcctgcttttatcgatgaaacgcttgccgctaaaggggcagaaaacatcgctaagcgcggtgaagcagatgcaagcgacgactttgaaggcgcgtatgaagaatggcgtgatcatatgtggagtgacgtagcagcctactttggtctcgacattgaaaacagtgaagataataaatctactctttcacttcaatttgtcgacagcgcggcggatatgcctcttgcgaaaatgcacggtgcgttttcaacgaacgtcgtagcaagcaaagaacttcaacagcctggcagtgcacgaagcacgcgacatcttgaaattgaacttccaaaagaagcttcttatcaagaaggagatcatttaggtgttattcctcgctattatgaaggaatagtaaaccgtgtaacacagaggttcggcctaagcgcatcacagctgatccgtctggaagcagaagaagaaaaattagctcatttgccactcgctaaaacagtatccgtagaagagcttctgcaatacgtggagcttcaagatcctgttacgcgcacgcagcttcgcgcaatggctgctaaaacggtctgcccgccgcataaagtagagcttgaagccttgcttggcaagcaagcctacaaagaacaagtgctggcaaaacgtttaacaatgcttgaactgcttgaaaaatacccggcgtgtgaaatgagtttcagcgaatttatcgcccttctgccaagcatacgcccgcgctattactcgatttcttcatcacctcgtgtcgatctgaaacaagcaagcatcacggtcagcgttgtcagcggaccggcgtggagcggatatggagaatataaaggaattgcgtcgaactatcttgctgagctgcaagaaggagatacgattacgtgctttatttccacaccgcagtcagagtttacgctgccaaaagaccctgaaacgccgcttatcatggtcggaccgggaacaggcgtcgcgccgtttagaggctttgtgcaggcgcgcaaacagctaaaagaacaaggacagtcacttggagaagcacatttatacttcggctgccgttcacctcatgaagactatctgtatcaagaagagcttgaaaacgcccaaagcgaaggcatcattctgcttcataccgctttttctcgcatgccgaatcagccgaaaacatacgttcagcacgtaatggaacaagacggcaagaaattgattgaacttcttgatcaaggagcgcacttctatatttgcggagacggaattcaaatggcacctgccgttgaagcaacgcttatgaaaagctatgctgacgttcaccaagtgtcggaagcagacgctcgcttatggctgcagcagctagaagaaaaaggccgatacgcaaaagacgtgtggctgggg

SEQ ID NO: 1252 - protein, 1049 aa, synthetic construct
  REGION 1..1049: note = variant of P450 oxidase from Bacillus megaterium
MTIKEMPQPKTFGELKNLPLLNTDKPVQALMRIADELGEIFKFEAPGSVTRYLSSQRLIKEACDESRFDKNLSQGLKFARDFVGDGLVTSWTHEPNWKKAHNILVPSFSQRAMGRYHAMMVDIAVQLVQKWERLNADEHIEVSEDMTRLTLDTIGLCLFNYRFNSFYRDTPHPFIVSVVRALDEVMNKLQRANPDDPAYDENKRQCQEDIKVMNDYVDKIIADRKNRGEQSHDLLTQMLNGKDPETGEPLDDGNIRQQIITFLIAGHQTTSGLLSFALYFLVKNPRVLQTVAEEAARVLVDPVPSYKQVKQLKYVGMVLNEALRLWPVAPMFSLYAKEDTVLGGEYPLTKGDEVMVLVPQLHRDKIIWGDDVEEFRPERFENPSAIPQHAFKPFGNGQRACIGQQFALHSATLVLGMMLKHFDFEDHTNYELKIKESRTLKPEGFVVKAKSKGIPLGGIPSPATEQKAKKVRKKAENAHNTPLLVLYGSNAGTAEGTARDLADIAMSKGFAPQVATLDSHAGNLPREGAVLIVTASYNGHPPDNAKQFVDWLDQASADEVKGVRYSVFGCGDKNWAGTYQKVPAFIDETLAAKGAENIAKRGEADASDDFEGAYEEWRDHMWSDVAAYFGLDIENSEDNKSTLSLQFVDSAADMPLAKMHGAFSTNVVASKELQQPGSARSTRHLEIELPKEASYQEGDHLGVIPRYYEGIVNRVTQRFGLSASQLIRLEAEEEKLAHLPLAKTVSVEELLQYVELQDPVTRTQLRAMAAKTVCPPHKVELEALLGKQAYKEQVLAKRLTMLELLEKYPACEMSFSEFIALLPSIRPRYYSISSSPRVDLKQASITVSVVSGPAWSGYGEYKGIASNYLAELQEGDTITCFISTPQSEFTLPKDPETPLIMVGPGTGVAPFRGFVQARKQLKEQGQSLGEAHLYFGCRSPHEDYLYQEELENAQSEGIILLHTAFSRMPNQPKTYVQHVMEQDGKKLIELLDQGAHFYICGDGIQMAPAVEATLMKSYADVHQVSEADARLWLQQLEEKGRYAKDVWLG

SEQ ID NO: 1253 - DNA, 3147 bp, synthetic construct
  misc_feature 1..3147: note = variant of P450 oxidase from Bacillus megaterium
  source 1..3147: mol_type = other DNA
atgacaattaaggaaatgcctcagcctaagacgtttggagaacttaaaaatttaccgttattaaatacagataaaccggttcaagctttgatgcgtattgcggatgaattaggagaaatctttaaattcgaggcgcctggtagcgtaacgcgctatttatcaagtcagcgtctaattaaagaagcatgcgatgaatcacgctttgataaaaacttaagtcaagggcttaaatttgcacgtgattttgttggagacgggctggttacaagctggacgcatgaaccgaattggaaaaaagcgcataatatcttagttccaagctttagtcagcgcgcaatggggcgttatcatgcgatgatggtcgatatcgccgtgcagcttgttcaaaagtgggagcgtctaaatgcagatgagcatattgaagtatcggaagacatgacacgtttaacgcttgatacaattggtctttgcctgtttaactatcgctttaacagcttttaccgagatacgcctcatccatttattgtgagtgtggttcgtgcactggatgaagtaatgaacaagctgcagcgagcaaatccagacgacccagcttatgatgaaaacaagcgccagtgtcaagaagatatcaaggtgatgaacgactatgtagataaaattattgcagatcgcaaaaacaggggtgaacaaagtcatgatttattaacccagatgctaaacggaaaagatccagaaacgggtgagccgcttgatgacgggaatattcgtcagcaaattattacattcttaattgcgggacaccaaacgacaagtggtcttttatcatttgcgctgtatttcttagtgaaaaatccacgtgtattacaaaaggtagcagaagaagcagcacgagttctagtagatcctgttccaagctacaaacaagtcaaacagcttaaatatgttggcatggtcttaaacgaagcgctgcgcttatggccagtagcgcctatgttttccctatatgcaaaagaagatacggtgcttggaggagaatatcctttaacgaaaggcgacgaagtaatggttctggtgcctcagcttcaccgtgataaaacaatttggggagacgatgtggaggagttccgtccagagcgttttgaaaatccaagtgcgattccgcagcatgcgtttaaaccgtttggaaacggtcagcgtgcgtgtatcggtcagcagttcgctcttcatagtgcaacgctggtacttggtatgatgctaaaacactttgactttgaagatcatacaaactacgagctcaagattaaagaatcgcggacgttaaaacctgaaggctttgtggtaaaagcaaaatcgaaaggcattccgcttggcggtattccttcacctagcactgaacagtctgctaaaaaagtacgcaaaaaggcagaaaacgctcataatacgccgctgcttgtgctatacggttcaaatgcgggaacagctgaaggaacggcgcgtgatttagcagatattgcaatgagcaaaggatttgcaccgcaggtcgcaacgcttgattcacacgccggtaatcttccgcgcgaaggagctgtattaattgtaacggcgtcttataacggtcatccgcctgataacgcaaagcaatttgtcgattggttagaccaagcgtctgcggatgaagtaaaaggcgttcgctactccgtatttggatgcggcgataaaaattgggcggggacgtatcaaaaagtgcctgcttttatcgatgaaacgcttgccgctaaaggggcagaaaacatcgctaagcgcggtgaagcagatgcaagcgacgactttgaaggcgcgtatgaagaatggcgtgatcatatgtggagtgacgtagcagcctactttggtctcgacattgaaaacagtgaagataataaatctactctttcacttcaatttgtcgacagcgcggcggatatgcctcttgcgaaaatgcacggtgcgttttcaacgaacgtcgtagcaagcaaagaacttcaacagcctggcagtgcacgaagcacgcgacatcttgaaattgaacttccaaaagaagcttcttatcaagaaggagatcatttaggtgttattcctcgctattatgaaggaatagtaaaccgtgtaacacagaggttcggcctaagcgcatcacagctgatccgtctggaagcagaagaagaaaaattagctcatttgccactcgctaaaacagtatccgtagaagagcttctgcaatacgtggagcttcaagatcctgttacgcgcacgcagcttcgcgcaatggctgctaaaacggtctgcccgccgcataaagtagagcttgaagccttgcttggcaagcaagcctacaaagaacaagtgctggcaaaacgtttaacaatgcttgaactgcttgaaaaatacccggcgtgtgaaatgagtttcagcgaatttatcgcccttctgccaagcatacgcccgcgctattactcgatttcttcatcacctcgtgtcgatctgaaacaagcaagcatcacggtcagcgttgtcagcggaccggcgtggagcggatatggagaatataaaggaattgcgtcgaactatcttgctgagctgcaagaaggagatacgattacgtgctttatttccacaccgcagtcagagtttacgctgccaaaagaccctgaaacgccgcttatcatggtcggaccgggaacaggcgtcgcgccgtttagaggctttgtgcaggcgcgcaaacagctaaaagaacaaggacagtcacttggagaagcacatttatacttcggctgccgttcacctcatgaagactatctgtatcaagaagagcttgaaaacgcccaaagcgaaggcatcattctgcttcataccgctttttctcgcatgccgaatcagccgaaaacatacgttcagcacgtaatggaacaagacggcaagaaattgattgaacttcttgatcaaggagcgcacttctatatttgcggagacggaattcaaatggcacctgccgttgaagcaacgcttatgaaaagctatgctgacgttcaccaagtgtcggaagcagacgctcgcttatggctgcagcagctagaagaaaaaggccgatacgcaaaagacgtgtggctgggg

SEQ ID NO: 1254 - protein, 1049 aa, synthetic construct
  REGION 1..1049: note = variant of P450 oxidase from Bacillus megaterium
MTIKEMPQPKTFGELKNLPLLNTDKPVQALMRIADELGEIFKFEAPGSVTRYLSSQRLIKEACDESRFDKNLSQGLKFARDFVGDGLVTSWTHEPNWKKAHNILVPSFSQRAMGRYHAMMVDIAVQLVQKWERLNADEHIEVSEDMTRLTLDTIGLCLFNYRFNSFYRDTPHPFIVSVVRALDEVMNKLQRANPDDPAYDENKRQCQEDIKVMNDYVDKIIADRKNRGEQSHDLLTQMLNGKDPETGEPLDDGNIRQQIITFLIAGHQTTSGLLSFALYFLVKNPRVLQKVAEEAARVLVDPVPSYKQVKQLKYVGMVLNEALRLWPVAPMFSLYAKEDTVLGGEYPLTKGDEVMVLVPQLHRDKTIWGDDVEEFRPERFENPSAIPQHAFKPFGNGQRACIGQQFALHSATLVLGMMLKHFDFEDHTNYELKIKESRTLKPEGFVVKAKSKGIPLGGIPSPSTEQSAKKVRKKAENAHNTPLLVLYGSNAGTAEGTARDLADIAMSKGFAPQVATLDSHAGNLPREGAVLIVTASYNGHPPDNAKQFVDWLDQASADEVKGVRYSVFGCGDKNWAGTYQKVPAFIDETLAAKGAENIAKRGEADASDDFEGAYEEWRDHMWSDVAAYFGLDIENSEDNKSTLSLQFVDSAADMPLAKMHGAFSTNVVASKELQQPGSARSTRHLEIELPKEASYQEGDHLGVIPRYYEGIVNRVTQRFGLSASQLIRLEAEEEKLAHLPLAKTVSVEELLQYVELQDPVTRTQLRAMAAKTVCPPHKVELEALLGKQAYKEQVLAKRLTMLELLEKYPACEMSFSEFIALLPSIRPRYYSISSSPRVDLKQASITVSVVSGPAWSGYGEYKGIASNYLAELQEGDTITCFISTPQSEFTLPKDPETPLIMVGPGTGVAPFRGFVQARKQLKEQGQSLGEAHLYFGCRSPHEDYLYQEELENAQSEGIILLHTAFSRMPNQPKTYVQHVMEQDGKKLIELLDQGAHFYICGDGIQMAPAVEATLMKSYADVHQVSEADARLWLQQLEEKGRYAKDVWLG

SEQ ID NO: 1255 - DNA, 3147 bp, synthetic construct
  misc_feature 1..3147: note = variant of P450 oxidase from Bacillus megaterium
  source 1..3147: mol_type = other DNA
atgacaattaaggaaatgcctcagcctaagacgtttggagaacttaaaaatttaccgttattaaatacagataaaccggttcaagctttgatgcgtattgcggatgaattaggagaaatctttaaattcgaggcgcctggtagcgtaacgcgctatttatcaagtcagcgtctaattaaagaagcatgcgatgaatcacgctttgataaaaacttaagtcaagggcttaaatttgcacgtgattttgttggagacgggctggttacaagctggacgcatgaaccgaattggaaaaaagcgcataatatcttagttccaagctttagtcagcgcgcaatggggcgttatcatgcgatgatggtcgatatcgccgtgcagcttgttcaaaagtgggagcgtctaaatgcagatgagcatattgaagtatcggaagacatgacacgtttaacgcttgatacaattggtctttgcctgtttaactatcgctttaacagcttttaccgagatacgcctcatccatttattgtgagtgtggttcgtgcactggatgaagtaatgaacaagctgcagcgagcaaatccagacgacccagcttatgatgaaaacaagcgccagtgtcaagaagatatcaaggtgatgaacgactatgtagataaaattattgcagatcgcaaaaacaggggtgaacaaagtcatgatttattaacccagatgctaaacggaaaagatccagaaacgggtgagccgcttgatgacgggaatattcgtcagcaaattattacattcttaattgcgggacaccaaacgacaagtggtcttttatcatttgcgctgtatttcttagtgaaaaatccacgtgtattacaaacggtagcagaagaagcagcacgagttctagtagatcctgttccaagctacaaacaagtcaaacagcttaaatatgttggcatggtcttaaacgaagcgctgcgcttatggccagtagcgcctatgttttccctatatgcaaaagaagatacggtgcttggaggagaatatcctttaacgaaaggcgacgaagtaatggttctggtgcctcagcttcaccgtgataaaacaatttggggagacgatgtggaggagttccgtccagagcgttttgaaaatccaagtgcgattccgcagcatgcgtttaaaccgtttggaaacggtcagcgtgcgtgtatcggtcagcagttcgctcttcatagtgcaacgctggtacttggtatgatgctaaaacactttgactttgaagatcatacaaactacgagctcaagattaaagaatcgcggacgttaaaacctgaaggctttgtggtaaaagcaaaatcgaaaggcattccgcttggcggtattccttcaccttcgactgaacagaaagctaaaaaagtacgcaaaaaggcagaaaacgctcataatacgccgctgcttgtgctatacggttcaaatgcgggaacagctgaaggaacggcgcgtgatttagcagatattgcaatgagcaaaggatttgcaccgcaggtcgcaacgcttgattcacacgccggtaatcttccgcgcgaaggagctgtattaattgtaacggcgtcttataacggtcatccgcctgataacgcaaagcaatttgtcgattggttagaccaagcgtctgcggatgaagtaaaaggcgttcgctactccgtatttggatgcggcgataaaaattgggcggggacgtatcaaaaagtgcctgcttttatcgatgaaacgcttgccgctaaaggggcagaaaacatcgctaagcgcggtgaagcagatgcaagcgacgactttgaaggcgcgtatgaagaatggcgtgatcatatgtggagtgacgtagcagcctactttggtctcgacattgaaaacagtgaagataataaatctactctttcacttcaatttgtcgacagcgcggcggatatgcctcttgcgaaaatgcacggtgcgttttcaacgaacgtcgtagcaagcaaagaacttcaacagcctggcagtgcacgaagcacgcgacatcttgaaattgaacttccaaaagaagcttcttatcaagaaggagatcatttaggtgttattcctcgctattatgaaggaatagtaaaccgtgtaacacagaggttcggcctaagcgcatcacagctgatccgtctggaagcagaagaagaaaaattagctcatttgccactcgctaaaacagtatccgtagaagagcttctgcaatacgtggagcttcaagatcctgttacgcgcacgcagcttcgcgcaatggctgctaaaacggtctgcccgccgcataaagtagagcttgaagccttgcttggcaagcaagcctataaagaaacggtgctggcaaaacgtttaacaatgcttgaactgcttgaaaaatacccggcgtgtgaaatgagtttcagcgaatttatcgcccttctgccaagcatacgcccgcgctattactcgatttcttcatcacctcgtgtcgatctgaaacaagcaagcatcacggtcagcgttgtcagcggaccggcgtggagcggatatggagaatataaaggaattgcgtcgaactatcttgctgagctgcaagaaggagatacgattacgtgctttatttccacaccgcagtcagagtttacgctgccaaaagaccctgaaacgccgcttatcatggtcggaccgggaacaggcgtcgcgccgtttagaggctttgtgcaggcgcgcaaacagctaaaagaacaaggacagtcacttggagaagcacatttatacttcggctgccgttcacctcatgaagactatctgtatcaagaagagcttgaaaacgcccaaagcgaaggcatcattctgcttcataccgctttttctcgcatgccgaatcagccgaaaacatacgttcagcacgtaatggaacaagacggcaagaaattgattgaacttcttgatcaaggagcgcacttctatatttgcggagacggaattcaaatggcacctgccgttgaagcaacgcttatgaaaagctatgctgacgttcaccaagtgacggaagcagacgctcgcttatggctgcagcagctagaagaaaaaggccgatacgcaaaagacgtgtggctgggg

SEQ ID NO: 1256 - protein, 1049 aa, synthetic construct
  REGION 1..1049: note = variant of P450 oxidase from Bacillus megaterium
MTIKEMPQPKTFGELKNLPLLNTDKPVQALMRIADELGEIFKFEAPGSVTRYLSSQRLIKEACDESRFDKNLSQGLKFARDFVGDGLVTSWTHEPNWKKAHNILVPSFSQRAMGRYHAMMVDIAVQLVQKWERLNADEHIEVSEDMTRLTLDTIGLCLFNYRFNSFYRDTPHPFIVSVVRALDEVMNKLQRANPDDPAYDENKRQCQEDIKVMNDYVDKIIADRKNRGEQSHDLLTQMLNGKDPETGEPLDDGNIRQQIITFLIAGHQTTSGLLSFALYFLVKNPRVLQTVAEEAARVLVDPVPSYKQVKQLKYVGMVLNEALRLWPVAPMFSLYAKEDTVLGGEYPLTKGDEVMVLVPQLHRDKTIWGDDVEEFRPERFENPSAIPQHAFKPFGNGQRACIGQQFALHSATLVLGMMLKHFDFEDHTNYELKIKESRTLKPEGFVVKAKSKGIPLGGIPSPSTEQKAKKVRKKAENAHNTPLLVLYGSNAGTAEGTARDLADIAMSKGFAPQVATLDSHAGNLPREGAVLIVTASYNGHPPDNAKQFVDWLDQASADEVKGVRYSVFGCGDKNWAGTYQKVPAFIDETLAAKGAENIAKRGEADASDDFEGAYEEWRDHMWSDVAAYFGLDIENSEDNKSTLSLQFVDSAADMPLAKMHGAFSTNVVASKELQQPGSARSTRHLEIELPKEASYQEGDHLGVIPRYYEGIVNRVTQRFGLSASQLIRLEAEEEKLAHLPLAKTVSVEELLQYVELQDPVTRTQLRAMAAKTVCPPHKVELEALLGKQAYKETVLAKRLTMLELLEKYPACEMSFSEFIALLPSIRPRYYSISSSPRVDLKQASITVSVVSGPAWSGYGEYKGIASNYLAELQEGDTITCFISTPQSEFTLPKDPETPLIMVGPGTGVAPFRGFVQARKQLKEQGQSLGEAHLYFGCRSPHEDYLYQEELENAQSEGIILLHTAFSRMPNQPKTYVQHVMEQDGKKLIELLDQGAHFYICGDGIQMAPAVEATLMKSYADVHQVTEADARLWLQQLEEKGRYAKDVWLG

SEQ ID NO: 1257 - DNA, 3147 bp, synthetic construct
  misc_feature 1..3147: note = variant of P450 oxidase from Bacillus megaterium
  source 1..3147: mol_type = other DNA
atgacaattaaggaaatgcctcagcctaagacgtttggagaacttaaaaatttaccgttattaaatacagataaaccggttcaagctttgatgcgtattgcggatgaattaggagaaatctttaaattcgaggcgcctggtagcgtaacgcgctatttatcaagtcagcgtctaattaaagaagcatgcgatgaatcacgctttgataaaaacttaagtcaagggcttaaatttgcacgtgattttgttggagacgggctggttacaagctggacgcatgaaccgaattggaaaaaagcgcataatatcttagttccaagctttagtcagcgcgcaatggggcgttatcatgcgatgatggtcgatatcgccgtgcagcttgttcaaaagtgggggcgtctaaatgcagatgagcatattgaagtatcggaagacatgacacgtttaacgcttgatacaattggtctttgcctgtttaactatcgctttaacagcttttaccgagatacgcctcatccatttattgtgagtgtggttcgtgcactggatgaagtaatgaacaagctgcagcgagcaaatccagacgacccagcttatgatgaaaacaagcgccagtgtcaagaagatatcaaggtgatgaacgactatgtagataaaattattgcagatcgcaaaaacaggggtgaacaaagtcatgatttattaacccagatgctaaacggaaaagatccagaaacgggtgagccgcttgatgacgggaatattcgtcagcaaattattacattcttaattgcgggacaccaaacgacaagtggtcttttatcatttgcgctgtatttcttagtgaaaaatccacgtgtattacaaaaagtagcagaagaagcagcacgagttctagtagatcctgttccaagctacaaacaagtcaaacagcttaaatatgttggcatggtcttaaacgaagcgctgcgcttatggccagtagcgcctatgttttccctatatgcaaaagaagatacggtgcttggaggagaatatcctttaacgaaaggcgacgaagtaatggttctggtgcctcagcttcaccgtgataaaacaatttggggagacgatgtggaggagttccgtccagagcgttttgaaaatccaagtgcgattccgcagcatgcgtttaaaccgtttggaaacggtcagcgtgcgtgtatcggtcagcagttcgctcttcatagtgcaacgctggtacttggtatgatgctaaaacactttgactttgaagatcatacaaactacgagctcgttattaaagaatcgcggacgttaaaacctgaaggctttgtggtaaaagcaaaatcgaaaggcattccgcttggcggtattccttcacctagcactgaacagtctgctaaaaaagtacgcaaaaaggcagaaaacgctcataatacgccgctgcttgtgctatacggttcaaatgcgggaacagctgaaggaacggcgcgtgatttagcagatattgcaatgagcaaaggatttgcaccgcaggtcgcaacgcttgattcacacgccggtaatcttccgcgcgaaggagctgtattaattgtaacggcgtcttataacggtcatccgcctgataacgcaaagcaatttgtcgattggttagaccaagcgtctgcggatgaagtaaaaggcgttcgctactccgtatttggatgcggcgataaaaattgggcggggacgtatcaaaaagtgcctgcttttatcgatgaaacgcttgccgctaaaggggcagaaaacatcgctaagcgcggtgaagcagatgcaagcgacgactttgaaggcgcgtatgaagaatggcgtgatcatatgtggagtgacgtagcagcctactttggtctcgacattgaaaacagtgaagataataaatctactctttcacttcaatttgtcgacagcgcggcggatatgcctcttgcgaaaatgcacggtgcgttttcaacgaacgtcgtagcaagcaaagaacttcaacagcctggcagtgcacgaagcacgcgacatcttgaaattgaacttccaaaagaagcttcttatcaagaaggagatcatttaggtgttattcctcgctattatgaaggaatagtaaaccgtgtaacacagaggttcggcctaagcgcatcacagctgatccgtctggaagcagaagaagaaaaattagctcatttgccactcgctaaaacagtatccgtagaagagcttctgcaatacgtggagcttcaagatcctgttacgcgcacgcagcttcgcgcaatggctgctaaaacggtctgcccgccgcataaagtagagcttgaagccttgcttggcaagcaagcctataaagaacaggtgctggcaaaacgtttaacaatgcttgaactgcttgaaaaatacccggcgtgtgaaatgagtttcagcgaatttatcgcccttctgccaagcatacgcccgcgctattactcgatttcttcatcacctcgtgtcgatctgaaacaagcaagcatcacggtcagcgttgtcagcggaccggcgtggagcggatatggagaatataaaggaattgcgtcgaactatcttgctgagctgcaagaaggagatacgattacgtgctttatttccacaccgcagtcagagtttacgctgccaaaagaccctgaaacgccgcttatcatggtcggaccgggaacaggcgtcgcgccgtttagaggctttgtgcaggcgcgcaaacagctaaaagaacaaggacagtcacttggagaagcacatttatacttcggctgccgttcacctcatgaagactatctgtatcaagaagagcttgaaaacgcccaaagcgaaggcatcattctgcttcataccgctttttctcgcatgccgaatcagccgaaaacatacgttcagcacgtaatggaacaagacggcaagaaattgattgaacttcttgatcaaggagcgcacttctatatttgcggagacggaattcaaatggcacctgccgttgaagcaacgcttatgaaaagctatgctgacgttcaccaagtgacggaagcagacgctcgcttatggctgcagcagctagaagaaaaaggccgatacgcaaaagacgtgtggctgggg

SEQ ID NO: 1258 - protein, 1049 aa, synthetic construct
  REGION 1..1049: note = variant of P450 oxidase from Bacillus megaterium
MTIKEMPQPKTFGELKNLPLLNTDKPVQALMRIADELGEIFKFEAPGSVTRYLSSQRLIKEACDESRFDKNLSQGLKFARDFVGDGLVTSWTHEPNWKKAHNILVPSFSQRAMGRYHAMMVDIAVQLVQKWGRLNADEHIEVSEDMTRLTLDTIGLCLFNYRFNSFYRDTPHPFIVSVVRALDEVMNKLQRANPDDPAYDENKRQCQEDIKVMNDYVDKIIADRKNRGEQSHDLLTQMLNGKDPETGEPLDDGNIRQQIITFLIAGHQTTSGLLSFALYFLVKNPRVLQKVAEEAARVLVDPVPSYKQVKQLKYVGMVLNEALRLWPVAPMFSLYAKEDTVLGGEYPLTKGDEVMVLVPQLHRDKTIWGDDVEEFRPERFENPSAIPQHAFKPFGNGQRACIGQQFALHSATLVLGMMLKHFDFEDHTNYELVIKESRTLKPEGFVVKAKSKGIPLGGIPSPSTEQSAKKVRKKAENAHNTPLLVLYGSNAGTAEGTARDLADIAMSKGFAPQVATLDSHAGNLPREGAVLIVTASYNGHPPDNAKQFVDWLDQASADEVKGVRYSVFGCGDKNWAGTYQKVPAFIDETLAAKGAENIAKRGEADASDDFEGAYEEWRDHMWSDVAAYFGLDIENSEDNKSTLSLQFVDSAADMPLAKMHGAFSTNVVASKELQQPGSARSTRHLEIELPKEASYQEGDHLGVIPRYYEGIVNRVTQRFGLSASQLIRLEAEEEKLAHLPLAKTVSVEELLQYVELQDPVTRTQLRAMAAKTVCPPHKVELEALLGKQAYKEQVLAKRLTMLELLEKYPACEMSFSEFIALLPSIRPRYYSISSSPRVDLKQASITVSVVSGPAWSGYGEYKGIASNYLAELQEGDTITCFISTPQSEFTLPKDPETPLIMVGPGTGVAPFRGFVQARKQLKEQGQSLGEAHLYFGCRSPHEDYLYQEELENAQSEGIILLHTAFSRMPNQPKTYVQHVMEQDGKKLIELLDQGAHFYICGDGIQMAPAVEATLMKSYADVHQVTEADARLWLQQLEEKGRYAKDVWLG

SEQ ID NO: 1259 - DNA, 3147 bp, synthetic construct
  misc_feature 1..3147: note = variant of P450 oxidase from Bacillus megaterium
  source 1..3147: mol_type = other DNA
atgacaattaaggaaatgcctcagcctaagacgtttggagaacttaaaaatttaccgttattaaatacagataaaccggttcaagctttgatgcgtattgcggatgaattaggagaaatctttaaattcgaggcgcctggtagcgtaacgcgctatttatcaagtcagcgtctaattaaagaagcatgcgatgaatcacgctttgataaaaacttaagtcaagggcttaaatttgcacgtgattttgttggagacgggctggttacaagctggacgcatgaaccgaattggaaaaaagcgcataatatcttagttccaagctttagtcagcgcgcaatggggcgttatcatgcgatgatggtcgatatcgccgtgcagcttgttcaaaagtgggagcgtctaaatgcagatgagcatattgaagtatcggaagacatgacacgtttaacgcttgatacaattggtctttgcctgtttaactatcgctttaacagcttttaccgagatacgcctcatccatttattgtgagtgtggttcgtgcactgggtgaagtaatgaacaagctgcagcgagcaaatccagacgacccagcttatgatgaaaacaagcgccagtgtcaagaagatatcaaggtgatgaacgactatgtagataaaattattgcagatcgcaaaaacaggggtgaacaaagtcatgatttattaacccagatgctaaacggaaaagatccagaaacgggtgagccgcttgatgacgggaatattcgtcagcaaattattacattcttaattgcgggacaccaaacgacaagtggtcttttatcatttgcgctgtatttcttagtgaaaaatccacgtgtattacaaaaagtagcagaagaagcagcacgagttctagtagatcctgttccaagctacaaacaagtcaaacagcttaaatatgttggcatggtcttaaacgaagcgctgcgcttatggccagtagcgcctatgttttccctatatgcaaaagaagatacggtgcttggaggagaatatcctttaacgaaaggcgacgaagtaatggttctggtgcctcagcttcaccgtgataaaacaatttggggagacgatgtggaggagttccgtccagagcgttttgaaaatccaagtgcgattccgcagcatgcgtttaaaccgtttggaaacggtcagcgtgcgtgtatcggtcagcagttcgctcttcatagtgcaacgctggtacttggtatgatgctaaaacactttgactttgaagatcatacaaactacgagctcgttattaaagaatcgcggacgttaaaacctgaaggctttgtggtaaaagcaaaatcgaaaggcattccgcttggcggtattccttcacctagcactgaacagtctgctaaaaaagtacgcaaaaaggcagaaaacgctcataatacgccgctgcttgtgctatacggttcaaatgcgggaacagctgaaggaacggcgcgtgatttagcagatattgcaatgagcaaaggatttgcaccgcaggtcgcaacgcttgattcacacgccggtaatcttccgcgcgaaggagctgtattaattgtaacggcgtcttataacggtcatccgcctgataacgcaaagcaatttgtcgattggttagaccaagcgtctgcggatgaagtaaaaggcgttcgctactccgtatttggatgcggcgataaaaattgggcggggacgtatcaaaaagtgcctgcttttatcgatgaaacgcttgccgctaaaggggcagaaaacatcgctaagcgcggtgaagcagatgcaagcgacgactttgaaggcgcgtatgaagaatggcgtgatcatatgtggagtgacgtagcagcctactttggtctcgacattgaaaacagtgaagataataaatctactctttcacttcaatttgtcgacagcgcggcggatatgcctcttgcgaaaatgcacggtgcgttttcaacgaacgtcgtagcaagcaaagaacttcaacagcctggcagtgcacgaagcacgcgacatcttgaaattgaacttccaaaagaagcttcttatcaagaaggagatcatttaggtgttattcctcgctattatgaaggaatagtaaaccgtgtaacacagaggttcggcctaagcgcatcacagctgatccgtctggaagcagaagaagaaaaattagctcatttgccactcgctaaaacagtatccgtagaagagcttctgcaatacgtggagcttcaagatcctgttacgcgcacgcagcttcgcgcaatggctgctaaaacggtctgcccgccgcataaagtagagcttgaagccttgcttggcaagcaagcctataaagaacaggtgctggcaaaacgtttaacaatgcttgaactgcttgaaaaatacccggcgtgtgaaatgagtttcagcgaatttatcgcccttctgccaagcatacgcccgcgctattactcgatttcttcatcacctcgtgtcgatctgaaacaagcaagcatcacggtcagcgttgtcagcggaccggcgtggagcggatatggagaatataaaggaattgcgtcgaactatcttgctgagctgcaagaaggagatacgattacgtgctttatttccacaccgcagtcagagtttacgctgccaaaagaccctgaaacgccgcttatcatggtcggaccgggaacaggcgtcgcgccgtttagaggctttgtgcaggcgcgcaaacagctaaaagaacaaggacagtcacttggagaagcacatttatacttcggctgccgttcacctcatgaagactatctgtatcaagaagagcttgaaaacgcccaaagcgaaggcatcattctgcttcataccgctttttctcgcatgccgaatcagccgaaaacatacgttcagcacgtaatggaacaagacggcaagaaattgattgaacttcttgatcaaggagcgcacttctatatttgcggagacggaattcaaatggcacctgccgttgaagcaacgcttatgaaaagctatgctgacgttcaccaagtggcggaagcagacgctcgcttatggctgcagcagctagaagaaaaaggccgatacgcaaaaaacgtgtggcggggg

SEQ ID NO: 1260 - protein, 1049 aa, synthetic construct
  REGION 1..1049: note = variant of P450 oxidase from Bacillus megaterium
MTIKEMPQPKTFGELKNLPLLNTDKPVQALMRIADELGEIFKFEAPGSVTRYLSSQRLIKEACDESRFDKNLSQGLKFARDFVGDGLVTSWTHEPNWKKAHNILVPSFSQRAMGRYHAMMVDIAVQLVQKWERLNADEHIEVSEDMTRLTLDTIGLCLFNYRFNSFYRDTPHPFIVSVVRALGEVMNKLQRANPDDPAYDENKRQCQEDIKVMNDYVDKIIADRKNRGEQSHDLLTQMLNGKDPETGEPLDDGNIRQQIITFLIAGHQTTSGLLSFALYFLVKNPRVLQKVAEEAARVLVDPVPSYKQVKQLKYVGMVLNEALRLWPVAPMFSLYAKEDTVLGGEYPLTKGDEVMVLVPQLHRDKTIWGDDVEEFRPERFENPSAIPQHAFKPFGNGQRACIGQQFALHSATLVLGMMLKHFDFEDHTNYELVIKESRTLKPEGFVVKAKSKGIPLGGIPSPSTEQSAKKVRKKAENAHNTPLLVLYGSNAGTAEGTARDLADIAMSKGFAPQVATLDSHAGNLPREGAVLIVTASYNGHPPDNAKQFVDWLDQASADEVKGVRYSVFGCGDKNWAGTYQKVPAFIDETLAAKGAENIAKRGEADASDDFEGAYEEWRDHMWSDVAAYFGLDIENSEDNKSTLSLQFVDSAADMPLAKMHGAFSTNVVASKELQQPGSARSTRHLEIELPKEASYQEGDHLGVIPRYYEGIVNRVTQRFGLSASQLIRLEAEEEKLAHLPLAKTVSVEELLQYVELQDPVTRTQLRAMAAKTVCPPHKVELEALLGKQAYKEQVLAKRLTMLELLEKYPACEMSFSEFIALLPSIRPRYYSISSSPRVDLKQASITVSVVSGPAWSGYGEYKGIASNYLAELQEGDTITCFISTPQSEFTLPKDPETPLIMVGPGTGVAPFRGFVQARKQLKEQGQSLGEAHLYFGCRSPHEDYLYQEELENAQSEGIILLHTAFSRMPNQPKTYVQHVMEQDGKKLIELLDQGAHFYICGDGIQMAPAVEATLMKSYADVHQVAEADARLWLQQLEEKGRYAKNVWRG

SEQ ID NO: 1261 - DNA, 3147 bp, synthetic construct
  misc_feature 1..3147: note = variant of P450 oxidase from Bacillus megaterium
  source 1..3147: mol_type = other DNA
atgacaattaaggaaatgcctcagcctaagacgtttggagaacttaaaaatttaccgttattaaatacagataaaccggttcaagctttgatgcgtattgcggatgaattaggagaaatctttaaattcgaggcgcctggtagcgtaacgcgctatttatcaagtcagcgtctaattaaagaagcatgcgatgaatcacgctttgataaaaacttaagtcaagggcttaaatttgcacgtgattttgttggagacgggctggttacaagctggacgcatgaaccgaattggaaaaaagcgcataatatcttagttccaagctttagtcagcgcgcaatggggcgttatcatgcgatgatggtcgatatcgccgtgcagcttgttcaaaagtgggagcgtctaaatgcagatgagcatattgaagtatcggaagacatgacacgtttaacgcttgatacaattggtctttgcctgtttaactatcgctttaacagcttttaccgagatacgcctcatccatttattgtgagtgtggttcgtgcactggatgaagtaatgaacaagctgcagcgagcaaatccagacgacccagcttatgatgaaaacaagcgccagtgtcaagaagatatcaaggtgatgaacgactatgtagataaaattattgcagatcgcaaaaacaggggtgaacaaagtcatgatttattaacccagatgctaaacggaaaagatccagaaacgggtgagccgcttgatgacgggaatattcgtcagcaaattattacattcttaattgcgggacaccaaacgacaagtggtcttttatcatttgcgctgtatttcttagtgaaaaatccacgtgtattacaaaaggtagcagaagaagcagcacgagttctagtagatcctgttccaagctacaaacaagtcaaacagcttaaatatgttggcatggtcttaaacgaagcgctgcgcttatggccagtagcgcctatgttttccctatatgcaaaagaagatacggtgcttggaggagaatatcctttaacgaaaggcgacgaagtaatggttctggtgcctcagcttcaccgtgataaaacaatttggggagacgatgtggaggagttccgtccagagcgttttgaaaatccaagtgcgattccgcagcatgcgtttaaaccgtttggaaacggtcagcgtgcgtgtatcggtcagcagttcgctcttcatagtgcaacgctggtacttggtatgatgctaaaacactttgactttgaagatcatacaaactacgagctcaagattaaagaatcgcggacgttaaaacctgaaggctttgtggtaaaagcaaaatcgaaaggcattccgcttggcggtattccttcacctagcactgaacagtctgctaaaaaagtacgcaaaaaggcagaaaacgctcataatacgccgctgcttgtgctatacggttcaaatgcgggaacagctgaaggaacggcgcgtgatttagcagatattgcaatgagcaaaggatttgcaccgcaggtcgcaacgcttgattcacacgccggtaatcttccgcgcgaaggagctgtattaattgtaacggcgtcttataacggtcatccgcctgataacgcaaagcaatttgtcgattggttagaccaagcgtctgcggatgaagtaaaaggcgttcgctactccgtatttggatgcggcgataaaaattgggcggggacgtatcaaaaagtgcctgcttttatcgatgaaacgcttgccgctaaaggggcagaaaacatcgctaagcgcggtgaagcagatgcaagcgacgactttgaaggcgcgtatgaagaatggcgtgatcatatgtggagtgacgtagcagcctactttggtctcgacattgaaaacagtgaagataataaatctactctttcacttcaatttgtcgacagcgcggcggatatgcctcttgcgaaaatgcacggtgcgttttcaacgaacgtcgtagcaagcaaagaacttcaacagcctggcagtgcacgaagcacgcgacatcttgaaattgaacttccaaaagaagcttcttatcaagaaggagatcatttaggtgttattcctcgctattatgaaggaatagtaaaccgtgtaacacagaggttcggcctaagcgcatcacagctgatccgtctggaagcagaagaagaaaaattagctcatttgccactcgctaaaacagtatccgtagaagagcttctgcaatacgtggagcttcaagatcctgttacgcgcacgcagcttcgcgcaatggctgctaaaacggtctgcccgccgcataaagtagagcttgaagccttgcttggcaagcaagcccataaagaacaggtgctggcaaaacgtttaacaatgcttgaactgcttgaaaaatacccggcgtgtgaaatgagtttcagcgaatttatcgcccttctgccaagcatacgcccgcgctattactcgatttcttcatcacctcgtgtcgatctgaaacaagcaagcatcacggtcagcgttgtcagcggaccggcgtggagcggatatggagaatataaaggaattgcgtcgaactatcttgctgagctgcaagaaggagatacgattacgtgctttatttccacaccgcagtcagagtttacgctgccaaaagaccctgaaacgccgcttatcatggtcggaccgggaacaggcgtcgcgccgtttagaggctttgtgcaggcgcgcaaacagctaaaagaacaaggacagtcacttggagaagcacatttatacttcggctgccgttcacctcatgaagactatctgtatcaagaagagcttgaaaacgcccaaagcgaaggcatcattctgcttcataccgctttttctcgcatgccgaatcagccgaaaacatacgttcagcacgtaatggaacaagacggcaagaaattgattgaacttcttgatcaaggagcgcacttctatatttgcggagacggaattcaaatggcacctgccgttgaagcaacgcttatgaaaagctatgctgacgttcaccaagtgagtgaagcagacgctcgcttatggctgcagcagctagaagaaaaaggccgatacgcaaaagacgtgtggctgggg

SEQ ID NO: 1262 - protein, 1049 aa, synthetic construct
  REGION 1..1049: note = variant of P450 oxidase from Bacillus megaterium
MTIKEMPQPKTFGELKNLPLLNTDKPVQALMRIADELGEIFKFEAPGSVTRYLSSQRLIKEACDESRFDKNLSQGLKFARDFVGDGLVTSWTHEPNWKKAHNILVPSFSQRAMGRYHAMMVDIAVQLVQKWERLNADEHIEVSEDMTRLTLDTIGLCLFNYRFNSFYRDTPHPFIVSVVRALDEVMNKLQRANPDDPAYDENKRQCQEDIKVMNDYVDKIIADRKNRGEQSHDLLTQMLNGKDPETGEPLDDGNIRQQIITFLIAGHQTTSGLLSFALYFLVKNPRVLQKVAEEAARVLVDPVPSYKQVKQLKYVGMVLNEALRLWPVAPMFSLYAKEDTVLGGEYPLTKGDEVMVLVPQLHRDKTIWGDDVEEFRPERFENPSAIPQHAFKPFGNGQRACIGQQFALHSATLVLGMMLKHFDFEDHTNYELKIKESRTLKPEGFVVKAKSKGIPLGGIPSPSTEQSAKKVRKKAENAHNTPLLVLYGSNAGTAEGTARDLADIAMSKGFAPQVATLDSHAGNLPREGAVLIVTASYNGHPPDNAKQFVDWLDQASADEVKGVRYSVFGCGDKNWAGTYQKVPAFIDETLAAKGAENIAKRGEADASDDFEGAYEEWRDHMWSDVAAYFGLDIENSEDNKSTLSLQFVDSAADMPLAKMHGAFSTNVVASKELQQPGSARSTRHLEIELPKEASYQEGDHLGVIPRYYEGIVNRVTQRFGLSASQLIRLEAEEEKLAHLPLAKTVSVEELLQYVELQDPVTRTQLRAMAAKTVCPPHKVELEALLGKQAHKEQVLAKRLTMLELLEKYPACEMSFSEFIALLPSIRPRYYSISSSPRVDLKQASITVSVVSGPAWSGYGEYKGIASNYLAELQEGDTITCFISTPQSEFTLPKDPETPLIMVGPGTGVAPFRGFVQARKQLKEQGQSLGEAHLYFGCRSPHEDYLYQEELENAQSEGIILLHTAFSRMPNQPKTYVQHVMEQDGKKLIELLDQGAHFYICGDGIQMAPAVEATLMKSYADVHQVSEADARLWLQQLEEKGRYAKDVWLG

SEQ ID NO: 1263 - DNA, 3147 bp, synthetic construct
  misc_feature 1..3147: note = variant of P450 oxidase from Bacillus megaterium
  source 1..3147: mol_type = other DNA
atgacaattaaggaaatgcctcagcctaagacgtttggagaacttaaaaatttaccgttattaaatacagataaaccggttcaagctttgatgcgtattgcggatgaattaggagaaatctttaaattcgaggcgcctggtagcgtaacgcgctatttatcaagtcagcgtctaattaaagaagcatgcgatgaatcacgctttgataaaaacttaagtcaagggcttaaatttgcacgtgattttgttggagacgggctggttacaagctggacgcatgaaccgaattggaaaaaagcgcataatatcttagttccaagctttagtcagcgcgcaatggggcgttatcatgcgatgatggtcgatatcgccgtgcagcttgttcaaaagtgggagcgtctaaatgcagatgagcatattgaagtatcggaagacatgacacgtttaacgcttgatacaattggtctttgcctgtttaactatcgctttaacagcttttaccgagatacgcctcatccatttattgtgagtgtggttcgtgcactggatgaagtaatgaacaagctgcagcgagcaaatccagacgacccagcttatgatgaaaacaagcgccagtgtcaagaagatatcaaggtgatgaacgactatgtagataaaattattgcagatcgcaaaaacaggggtgaacaaagtcatgatttattaacccagatgctaaacggaaaagatccagaaacgggtgagccgcttgatgacgggaatattcgtcagcaaattattacattcttaattgcgggacaccaaacgacaagtggtcttttatcatttgcgctgtatttcttagtgaaaaatccacgtgtattacaaacggtagcagaagaagcagcacgagttctagtagatcctgttccaagctacaaacaagtcaaacagcttaaatatgttggcatggtcttaaacgaagcgctgcgcttatggccagtagcgcctatgttttccctatatgcaaaagaagatacggtgcttggaggagaatatcctttaacgaaaggcgacgaagtaatggttctggtgcctcagcttcaccgtgataaaaccatttggggagacgatgtggaggagttccgtccagagcgttttgaaaatccaagtgcgattccgcagcatgcgtttaaaccgtttggaaacggtcagcgtgcgtgtatcggtcagcagttcgctcttcatagtgcaacgctggtacttggtatgatgctaaaacactttgactttgaagatcatacaaactacgagctcaagattaaagaatcgcggacgttaaaacctgaaggctttgtggtaaaagcaaaatcgaaaggcattccgcttggcggtattccttcacctagcactgaacagtctgctaaaaaagtacgcaaaaaggcagaaaacgctcataatacgccgctgcttgtgctatacggttcaaatgcgggaacagctgaaggaacggcgcgtgatttagcagatattgcaatgagcaaaggatttgcaccgcaggtcgcaacgcttgattcacacgccggtaatcttccgcgcgaaggagctgtattaattgtaacggcgtcttataacggtcatccgcctgataacgcaaagcaatttgtcgattggttagaccaagcgtctgcggatgaagtaaaaggcgttcgctactccgtatttggatgcggcgataaaaattgggcggggacgtatcaaaaagtgcctgcttttatcgatgaaacgcttgccgctaaaggggcagaaaacatcgctaagcgcggtgaagcagatgcaagcgacgactttgaaggcgcgtatgaagaatggcgtgatcatatgtggagtgacgtagcagcctactttggtctcgacattgaaaacagtgaagataataaatctactctttcacttcaatttgtcgacagcgcggcggatatgcctcttgcgaaaatgcacggtgcgttttcaacgaacgtcgtagcaagcaaagaacttcaacagcctggcagtgcacgaagcacgcgacatcttgaaattgaacttccaaaagaagcttcttatcaagaaggagatcatttaggtgttattcctcgctattatgaaggaatagtaaaccgtgtaacacagaggttcggcctaagcgcatcacagctgatccgtctggaagcagaagaagaaaaattagctcatttgccactcgctaaaacagtatccgtagaagagcttctgcaatacgtggagcttcaagatcctgttacgcgcacgcagcttcgcgcaatggctgctaaaacggtctgcccgccgcataaagtagagcttgaagccttgcttggcaagcaagcctataaagaaacggtgctggcaaaacgtttaacaatgcttgaactgcttgaaaaatacccggcgtgtgaaatgagtttcagcgaatttatcgcccttctgccaagcatacgcccgcgctattactcgatttcttcatcacctcgtgtcgatctgaaacaagcaagcatcacggtcagcgttgtcagcggaccggcgtggagcggatatggagaatataaaggaattgcgtcgaactatcttgctgagctgcaagaaggagatacgattacgtgctttatttccacaccgcagtcagagtttacgctgccaaaagaccctgaaacgccgcttatcatggtcggaccgggaacaggcgtcgcgccgtttagaggctttgtgcaggcgcgcaaacagctaaaagaacaaggacagtcacttggagaagcacatttatacttcggctgccgttcacctcatgaagactatctgtatcaagaagagcttgaaaacgcccaaagcgaaggcatcattctgcttcataccgctttttctcgcatgccgaatcagccgaaaacatacgttcagcacgtaatggaacaagacggcaagaaattgattgaacttcttgatcaaggagcgcacttctatatttgcggagacggaattcaaatggcacctgccgttgaagcaacgcttatgaaaagctatgctgacgttcaccaagtgagtgaagcagacgctcgcttatggctgcagcagctagaagaaaaaggccgatacgcaaaagacgtgtggctgggg

SEQ ID NO: 1264 - protein, 1049 aa, synthetic construct
  REGION 1..1049: note = variant of P450 oxidase from Bacillus megaterium
MTIKEMPQPKTFGELKNLPLLNTDKPVQALMRIADELGEIFKFEAPGSVTRYLSSQRLIKEACDESRFDKNLSQGLKFARDFVGDGLVTSWTHEPNWKKAHNILVPSFSQRAMGRYHAMMVDIAVQLVQKWERLNADEHIEVSEDMTRLTLDTIGLCLFNYRFNSFYRDTPHPFIVSVVRALDEVMNKLQRANPDDPAYDENKRQCQEDIKVMNDYVDKIIADRKNRGEQSHDLLTQMLNGKDPETGEPLDDGNIRQQIITFLIAGHQTTSGLLSFALYFLVKNPRVLQTVAEEAARVLVDPVPSYKQVKQLKYVGMVLNEALRLWPVAPMFSLYAKEDTVLGGEYPLTKGDEVMVLVPQLHRDKTIWGDDVEEFRPERFENPSAIPQHAFKPFGNGQRACIGQQFALHSATLVLGMMLKHFDFEDHTNYELKIKESRTLKPEGFVVKAKSKGIPLGGIPSPSTEQSAKKVRKKAENAHNTPLLVLYGSNAGTAEGTARDLADIAMSKGFAPQVATLDSHAGNLPREGAVLIVTASYNGHPPDNAKQFVDWLDQASADEVKGVRYSVFGCGDKNWAGTYQKVPAFIDETLAAKGAENIAKRGEADASDDFEGAYEEWRDHMWSDVAAYFGLDIENSEDNKSTLSLQFVDSAADMPLAKMHGAFSTNVVASKELQQPGSARSTRHLEIELPKEASYQEGDHLGVIPRYYEGIVNRVTQRFGLSASQLIRLEAEEEKLAHLPLAKTVSVEELLQYVELQDPVTRTQLRAMAAKTVCPPHKVELEALLGKQAYKETVLAKRLTMLELLEKYPACEMSFSEFIALLPSIRPRYYSISSSPRVDLKQASITVSVVSGPAWSGYGEYKGIASNYLAELQEGDTITCFISTPQSEFTLPKDPETPLIMVGPGTGVAPFRGFVQARKQLKEQGQSLGEAHLYFGCRSPHEDYLYQEELENAQSEGIILLHTAFSRMPNQPKTYVQHVMEQDGKKLIELLDQGAHFYICGDGIQMAPAVEATLMKSYADVHQVSEADARLWLQQLEEKGRYAKDVWLG

SEQ ID NO: 1265 - DNA, 3147 bp, synthetic construct
  misc_feature 1..3147: note = variant of P450 oxidase from Bacillus megaterium
  source 1..3147: mol_type = other DNA
atgacaattaaggaaatgcctcagcctaagacgtttggagaacttaaaaatttaccgttattaaatacagataaaccggttcaagctttgatgcgtattgcggatgaattaggagaaatctttaaattcgaggcgcctggtagcgtaacgcgctatttatcaagtcagcgtctaattaaagaagcatgcgatgaatcacgctttgataaaaacttaagtcaagggcttaaatttgcacgtgattttgttggagacgggctggttacaagctggacgcatgaaccgaattggaaaaaagcgcataatatcttagttccaagctttagtcagcgcgcaatggggcgttatcatgcgatgatggtcgatatcgccgtgcagcttgttcaaaagtgggggcgtctaaatgcagatgagcatattgaagtatcggaagacatgacacgtttaacgcttgatacaattggtctttgcctgtttaactatcgctttaacagcttttaccgagatacgcctcatccatttattgtgagtgtggttcgtgcactggatgaagtaatgaacaagctgcagcgagcaaatccagacgacccagcttatgatgaaaacaagcgccagtgtcaagaagatatcaaggtgatgaacgactatgtagataaaattattgcagatcgcaaaaacaggggtgaacaaagtcatgatttattaacccagatgctaaacggaaaagatccagaaacgggtgagccgcttgatgacgggaatattcgtcagcaaattattacattcttaattgcgggacaccaaacgacaagtggtcttttatcatttgcgctgtatttcttagtgaaaaatccacgtgtattacaaaaggtagcagaagaagcagcacgagttctagtagatcctgttccaagctacaaacaagtcaaacagcttaaatatgttggcatggtcttaaacgaagcgctgcgcttatggccagtagcgcctatgttttccctatatgcaaaagaagatacggtgcttggaggagaatatcctttaacgaaaggcgacgaagtaatggttctggtgcctcagcttcaccgtgataaaatcatttggggagacgatgtggaggagttccgtccagagcgttttgaaaatccaagtgcgattccgcagcatgcgtttaaaccgtttggaaacggtcagcgtgcgtgtatcggtcagcagttcgctcttcatagtgcaacgctggtacttggtatgatgctaaaacactttgactttgaagatcatacaaactacgagctcgtcattaaagaatcgcggacgttaaaacctgaaggctttgtggtaaaagcaaaatcgaaaggcattccgcttggcggtattccttcaccttcgactgaacagggtgctaaaaaagtacgcaaaaaggcagaaaacgctcataatacgccgctgcttgtgctatacggttcaaatgcgggaacagctgaaggaacggcgcgtgatttagcagatattgcaatgagcaaaggatttgcaccgcaggtcgcaacgcttgattcacacgccggtaatcttccgcgcgaaggagctgtattaattgtaacggcgtcttataacggtcatccgcctgataacgcaaagcaatttgtcgattggttagaccaagcgtctgcggatgaagtaaaaggcgttcgctactccgtatttggatgcggcgataaaaattgggcggggacgtatcaaaaagtgcctgcttttatcgatgaaacgcttgccgctaaaggggcagaaaacatcgctaagcgcggtgaagcagatgcaagcgacgactttgaaggcgcgtatgaagaatggcgtgatcatatgtggagtgacgtagcagcctactttggtctcgacattgaaaacagtgaagataataaatctactctttcacttcaatttgtcgacagcgcggcggatatgcctcttgcgaaaatgcacgatgcgttttcaacgaacgtcgtagcaagcaaagaacttcaacagcctggcagtgcacgaagcacgcgacatcttgaaattgaacttccaaaagaagcttcttatcaagaaggagatcatttaggtgttattcctcgctattatgaaggaatagtaaaccgtgtaacacagaggttcggcctaagcgcatcacagctgatccgtctggaagcagaagaagaaaaattagctcatttgccactcgctaaaacagtatccgtagaagagcttctgcaatacgtggagcttcaagatcctgttacgcgcacgcagcttcgcgcaatggctgctaaaacggtctgcccgccgcataaagtagagcttgaagccttgcttggcaagcaagcctataaagaacaggtgctggcaaaacgtttaacaatgcttgaactgcttgaaaaatacccggcgtgtgaaatgagtttcagcgaatttatcgcccttctgccaagcatacgcccgcgctattactcgatttcttcatcacctcgtgtcgatctgaaacaagcaagcatcacggtcagcgttgtcagcggaccggcgtggagcggatatggagaatataaaggaattgcgtcgaactatcttgctgagctgcaagaaggagatacgattacgtgctttatttccacaccgcagtcagagtttacgctgccaaaagaccctgaaacgccgcttatcatggtcggaccgggaacaggcgtcgcgccgtttagaggctttgtgcaggcgcgcaaacagctaaaagaacaaggacagtcacttggagaagcacatttatacttcggctgccgttcacctcatgaagactatctgtatcaagaagagcttgaaaacgcccaaagcgaaggcatcattctgcttcataccgctttttctcgcatgccgaatcagccgaaaacatacgttcagcacgtaatggaacaagacggcaagaaattgattgaacttcttgatcaaggagcgcacttctatatttgcggagacggaattcaaatggcacctgccgttgaagcaacgcttatgaaaagctatgctgacgttcaccaagtgtcggaagcagacgctcgcttatggctgcagcagctagaagaaaaaggccgatacgcaaaagacgtgtggctgggg

SEQ ID NO: 1266 - protein, 1049 aa, synthetic construct
  REGION 1..1049: note = variant of P450 oxidase from Bacillus megaterium
MTIKEMPQPKTFGELKNLPLLNTDKPVQALMRIADELGEIFKFEAPGSVTRYLSSQRLIKEACDESRFDKNLSQGLKFARDFVGDGLVTSWTHEPNWKKAHNILVPSFSQRAMGRYHAMMVDIAVQLVQKWGRLNADEHIEVSEDMTRLTLDTIGLCLFNYRFNSFYRDTPHPFIVSVVRALDEVMNKLQRANPDDPAYDENKRQCQEDIKVMNDYVDKIIADRKNRGEQSHDLLTQMLNGKDPETGEPLDDGNIRQQIITFLIAGHQTTSGLLSFALYFLVKNPRVLQKVAEEAARVLVDPVPSYKQVKQLKYVGMVLNEALRLWPVAPMFSLYAKEDTVLGGEYPLTKGDEVMVLVPQLHRDKIIWGDDVEEFRPERFENPSAIPQHAFKPFGNGQRACIGQQFALHSATLVLGMMLKHFDFEDHTNYELVIKESRTLKPEGFVVKAKSKGIPLGGIPSPSTEQGAKKVRKKAENAHNTPLLVLYGSNAGTAEGTARDLADIAMSKGFAPQVATLDSHAGNLPREGAVLIVTASYNGHPPDNAKQFVDWLDQASADEVKGVRYSVFGCGDKNWAGTYQKVPAFIDETLAAKGAENIAKRGEADASDDFEGAYEEWRDHMWSDVAAYFGLDIENSEDNKSTLSLQFVDSAADMPLAKMHDAFSTNVVASKELQQPGSARSTRHLEIELPKEASYQEGDHLGVIPRYYEGIVNRVTQRFGLSASQLIRLEAEEEKLAHLPLAKTVSVEELLQYVELQDPVTRTQLRAMAAKTVCPPHKVELEALLGKQAYKEQVLAKRLTMLELLEKYPACEMSFSEFIALLPSIRPRYYSISSSPRVDLKQASITVSVVSGPAWSGYGEYKGIASNYLAELQEGDTITCFISTPQSEFTLPKDPETPLIMVGPGTGVAPFRGFVQARKQLKEQGQSLGEAHLYFGCRSPHEDYLYQEELENAQSEGIILLHTAFSRMPNQPKTYVQHVMEQDGKKLIELLDQGAHFYICGDGIQMAPAVEATLMKSYADVHQVSEADARLWLQQLEEKGRYAKDVWLG

SEQ ID NO: 1267 - DNA, 3147 bp, synthetic construct
  misc_feature 1..3147: note = variant of P450 oxidase from Bacillus megaterium
  source 1..3147: mol_type = other DNA
atgacaattaaggaaatgcctcagcctaagacgtttggagaacttaaaaatttaccgttattaaatacagataaaccggttcaagctttgatgcgtattgcggatgaattaggagaaatctttaaattcgaggcgcctggtagcgtaacgcgctatttatcaagtcagcgtctaattaaagaagcatgcgatgaatcacgctttgataaaaacttaagtcaagggcttaaatttgcacgtgattttgttggagacgggctggttacaagctggacgcatgaaccgaattggaaaaaagcgcataatatcttagttccaagctttagtcagcgcgcaatggggcgttatcatgcgatgatggtcgatatcgccgtgcagcttgttcaaaagtgggagcgtctaaatgcagatgagcatattgaagtatcggaagacatgacacgtttaacgcttgatacaattggtctttgcctgtttaactatcgctttaacagcttttaccgagatacgcctcatccatttattgtgagtgtggttcgtgcactggatgaagtaatgaacaagctgcagcgagcaaatccagacgacccagcttatgatgaaaacaagcgccagtgtcaagaagatatcaaggtgatgaacgactatgtagataaaattattgcagatcgcaaaaacaggggtgaacaaagtcatgatttattaacccagatgctaaacggaaaagatccagaaacgggtgagccgcttgatgacgggaatattcgtcagcaaattattacattcttaattgcgggacaccaaacgacaagtggtcttttatcatttgcgctgtatttcttagtgaaaaatccacgtgtattacaaaaggtagcagaagaagcagcacgagttctagtagatcctgttccaagctacaaacaagtcaaacagcttaaatatgttggcatggtcttaaacgaagcgctgcgcttatggccagtagcgcctatgttttccctatatgcaaaagaagatacggtgcttggaggagaatatcctttaacgaaaggcgacgaagtaatggttctggtgcctcagcttcaccgtgataaaaccatttggggagacgatgtggaggagttccgtccagagcgttttgaaaatccaagtgcgattccgcagcatgcgtttaaaccgtttggaaacggtcagcgtgcgtgtatcggtcagcagttcgctcttcatagtgcaacgctggtacttggtatgatgctaaaacactttgactttgaagatcatacaaactacgagctcgtcattaaagaatcgcggacgttaaaacctgaaggctttgtggtaaaagcaaaatcgaaaggcattccgcttggcggtattccttcacctagcactgaacagtctgctaaaaaagtacgcaaaaaggcagaaaacgctcataatacgccgctgcttgtgctatacggttcaaatgcgggaacagctgaaggaacggcgcgtgatttagcagatattgcaatgagcaaaggatttgcaccgcaggtcgcaacgcttgattcacacgccggtaatcttccgcgcgaaggagctgtattaattgtaacggcgtcttataacggtcatccgcctgataacgcaaagcaatttgtcgattggttagaccaagcgtctgcggatgaagtaaaaggcgttcgctactccgtatttggatgcggcgataaaaattgggcggggacgtatcaaaaagtgcctgcttttatcgatgaaacgcttgccgctaaaggggcagaaaacatcgctaagcgcggtgaagcagatgcaagcgacgactttgaaggcgcgtatgaagaatggcgtgatcatatgtggagtgacgtagcagcctactttggtctcgacattgaaaacagtgaagataataaatctactctttcacttcaatttgtcgacagcgcggcggatatgcctcttgcgaaaatgcacggtgcgttttcaacgaacgtcgtagcaagcaaagaacttcaacagcctggcagtgcacgaagcacgcgacatcttgaaattgaacttccaaaagaagcttcttatcaagaaggagatcatttaggtgttattcctcgctattatgaaggaatagtaaaccgtgtaacacagaggttcggcctaagcgcatcacagctgatccgtctggaagcagaagaagaaaaattagctcatttgccactcgctaaaacagtatccgtagaagagcttctgcaatacgtggagcttcaagatcctgttacgcgcacgcagcttcgcgcaatggctgctaaaacggtctgcccgccgcataaagtagagcttgaagccttgcttggcaagcaagcctataaagaaacggtgctggcaaaacgtttaacaatgcttgaactgcttgaaaaatacccggcgtgtgaaatgagtttcagcgaatttatcgcccttctgccaagcatacgcccgcgctattactcgatttcttcatcacctcgtgtcgatctgaaacaagcaagcatcacggtcagcgttgtcagcggaccggcgtggagcggatatggagaatataaaggaattgcgtcgaactatcttgctgagctgcaagaaggagatacgattacgtgctttatttccacaccgcagtcagagtttacgctgccaaaagaccctgaaacgccgcttatcatggtcggaccgggaacaggcgtcgcgccgtttagaggctttgtgcaggcgcgcaaacagctaaaagaacaaggacagtcacttggagaagcacatttatacttcggctgccgttcacctcatgaagactatctgtatcaagaagagcttgaaaacgcccaaagcgaaggcatcattctgcttcataccgctttttctcgcatgccgaatcagccgaaaacatacgttcagcacgtaatggaacaagacggcaagaaattgattgaacttcttgatcaaggagcgcacttctatatttgcggagacggaattcaaatggcacctgccgttgaagcaacgcttatgaaaagctatgctgacgttcaccaagtgtcggaagcagacgctcgcttatggctgcagcagctagaagaaaaaggccgatacgcaaaagacgtgtggctgggg

SEQ ID NO: 1268 - protein, 1049 aa, synthetic construct
  REGION 1..1049: note = variant of P450 oxidase from Bacillus megaterium
MTIKEMPQPKTFGELKNLPLLNTDKPVQALMRIADELGEIFKFEAPGSVTRYLSSQRLIKEACDESRFDKNLSQGLKFARDFVGDGLVTSWTHEPNWKKAHNILVPSFSQRAMGRYHAMMVDIAVQLVQKWERLNADEHIEVSEDMTRLTLDTIGLCLFNYRFNSFYRDTPHPFIVSVVRALDEVMNKLQRANPDDPAYDENKRQCQEDIKVMNDYVDKIIADRKNRGEQSHDLLTQMLNGKDPETGEPLDDGNIRQQIITFLIAGHQTTSGLLSFALYFLVKNPRVLQKVAEEAARVLVDPVPSYKQVKQLKYVGMVLNEALRLWPVAPMFSLYAKEDTVLGGEYPLTKGDEVMVLVPQLHRDKTIWGDDVEEFRPERFENPSAIPQHAFKPFGNGQRACIGQQFALHSATLVLGMMLKHFDFEDHTNYELVIKESRTLKPEGFVVKAKSKGIPLGGIPSPSTEQSAKKVRKKAENAHNTPLLVLYGSNAGTAEGTARDLADIAMSKGFAPQVATLDSHAGNLPREGAVLIVTASYNGHPPDNAKQFVDWLDQASADEVKGVRYSVFGCGDKNWAGTYQKVPAFIDETLAAKGAENIAKRGEADASDDFEGAYEEWRDHMWSDVAAYFGLDIENSEDNKSTLSLQFVDSAADMPLAKMHGAFSTNVVASKELQQPGSARSTRHLEIELPKEASYQEGDHLGVIPRYYEGIVNRVTQRFGLSASQLIRLEAEEEKLAHLPLAKTVSVEELLQYVELQDPVTRTQLRAMAAKTVCPPHKVELEALLGKQAYKETVLAKRLTMLELLEKYPACEMSFSEFIALLPSIRPRYYSISSSPRVDLKQASITVSVVSGPAWSGYGEYKGIASNYLAELQEGDTITCFISTPQSEFTLPKDPETPLIMVGPGTGVAPFRGFVQARKQLKEQGQSLGEAHLYFGCRSPHEDYLYQEELENAQSEGIILLHTAFSRMPNQPKTYVQHVMEQDGKKLIELLDQGAHFYICGDGIQMAPAVEATLMKSYADVHQVSEADARLWLQQLEEKGRYAKDVWLG

SEQ ID NO: 1269 - DNA, 3147 bp, synthetic construct
  misc_feature 1..3147: note = variant of P450 oxidase from Bacillus megaterium
  source 1..3147: mol_type = other DNA
atgacaattaaggaaatgcctcagcctaagacgtttggagaacttaaaaatttaccgttattaaatacagataaaccggttcaagctttgatgcgtattgcggatgaattaggagaaatctttaaattcgaggcgcctggtagcgtaacgcgctatttatcaagtcagcgtctaattaaagaagcatgcgatgaatcacgctttgataaaaacttaagtcaagggcttaaatttgcacgtgattttgttggagacgggctggttacaagctggacgcatgaaccgaattggaaaaaagcgcataatatcttagttccaagctttagtcagcgcgcaatggggcgttatcatgcgatgatggtcgatatcgccgtgcagcttgttcaaaagtgggggcgtctaaatgcagatgagcatattgaagtatcggaagacatgacacgtttaacgcttgatacaattggtctttgcctgtttaactatcgctttaacagcttttaccgagatacgcctcatccatttattgtgagtgtggttcgtgcactggatgaagtaatgaacaagctgcagcgagcaaatccagacgacccagcttatgatgaaaacaagcgccagtgtcaagaagatatcaaggtgatgaacgactatgtagataaaattattgcagatcgcaaaaacaggggtgaacaaagtcatgatttattaacccagatgctaaacggaaaagatccagaaacgggtgagccgcttgatgacgggaatattcgtcagcaaattattacattcttaattgcgggacaccaaacgacaagtggtcttttatcatttgcgctgtatttcttagtgaaaaatccacgtgtattacaaaaggtagcagaagaagcagcacgagttctagtagatcctgttccaagctacaaacaagtcaaacagcttaaatatgttggcatggtcttaaacgaagcgctgcgcttatggccagtagcgcctatgttttccctatatgcaaaagaagatacggtgcttggaggagaatatcctttaacgaaaggcgacgaagtaatggttctggtgcctcagcttcaccgtgataaaaccatttggggagacgatgtggaggagttccgtccagagcgttttgaaaatccaagtgcgattccgcagcatgcgtttaaaccgtttggaaacggtcagcgtgcgtgtatcggtcagcagttcgctcttcatagtgcaacgctggtacttggtatgatgctaaaacactttgactttgaagatcatacaaactacgagctcgttattaaagaatcgcggacgttaaaacctgaaggctttgtggtaaaagcaaaatcgaaaggcattccgcttggcggtattccttcaccttcgactgaacagaaatttaaaaaagtacgcaaaaaggcagaaaacgctcataatacgccgctgcttgtgctatacggttcaaatgcgggaacagctgaaggaacggcgcgtgatttagcagatattgcagtgagcaaaggatttgcaccgcaggtcgcaacgcttgattcacacgccggtaatcttccgcgcgaaggagctgtattaattgtaacggcgtcttataacggtcatccgcctgataacgcaaagcaatttgtcgattggttagaccaagcgtctgcggatgaagtaaaaggcgttcgctactccgtatttggatgcggcgataaaaattgggcggggacgtatcaaaaagtgcctgcttttatcgatgaaacgcttgccgctaaaggggcagaaaacatcgctaagcgcggtgaagcagatgcaagcgacgactttgaaggcgcgtatgaagaatggcgtgatcatatgtggagtgacgtagcagcctactttggtctcgacattgaaaacagtgaagataataaatctactctttcacttcaatttgtcgacagcgcggcggatatgcctcttgcgaaaatgcacggtgcgttttcaacgaacgtcgtagcaagcaaagaacttcaacagcctggcagtgcacgaagcacgcgacatcttgaaattgaacttccaaaagaagcttcttatcaagaaggagatcatttaggtgttattcctcgctattatgaaggaatagtaaaccgtgtaacacagaggttcggcctaagcgcatcacagctgatccgtctggaagcagaagaagaaaaattagctcatttgccactcgctaaaacagtatccgtagaagagcttctgcaatacgtggagcttcaagatcctgttacgcgcacgcagcttcgcgcaatggctgctaaaacggtctgcccgccgcataaagtagagcttgaagccttgcttggcaagcaagcctataaagaaacggtgctggcaaaacgtttaacaatgcttgaactgcttgaaaaatacccggcgtgtgaaatgagtttcagcgaatttatcgcccttctgccaagcatacgcccgcgctattactcgatttcttcatcacctcgtgtcgatctgaaacaagcaagcatcacggtcagcgttgtcagcggaccggcgtggagcggatatggagaatataaaggaattgcgtcgaactatcttgctgagctgcaagaaggagatacgattacgtgctttatttccacaccgcagtcagagtttacgctgccaaaagaccctgaaacgccgcttatcatggtcggaccgggaacaggcgtcgcgccgtttagaggctttgtgcaggcgcgcaaacagctaaaagaacaaggacagtcacttggagaagcacatttatacttcggctgccgttcacctcatgaagactatctgtatcaagaagagcttgaaaacgcccaaagcgaaggcatcattctgcttcataccgctttttctcgcatgccgaatcagccgaaaacatacgttcagcacgtaatggaacaagacggcaagaaattgattgaacttcttgatcaaggagcgcacttctatatttgcggagacggaattcaaatggcacctgccgttgaagcaacgcttatgaaaagctatgctgacgttcaccaagtgtcggaagcagacgctcgcttatggctgcagcagctagaagaaaaaggccgatacgcaaaagacgtgtggctgggg

SEQ ID NO: 1270 - protein, 1049 aa, synthetic construct
  REGION 1..1049: note = variant of P450 oxidase from Bacillus megaterium
MTIKEMPQPKTFGELKNLPLLNTDKPVQALMRIADELGEIFKFEAPGSVTRYLSSQRLIKEACDESRFDKNLSQGLKFARDFVGDGLVTSWTHEPNWKKAHNILVPSFSQRAMGRYHAMMVDIAVQLVQKWGRLNADEHIEVSEDMTRLTLDTIGLCLFNYRFNSFYRDTPHPFIVSVVRALDEVMNKLQRANPDDPAYDENKRQCQEDIKVMNDYVDKIIADRKNRGEQSHDLLTQMLNGKDPETGEPLDDGNIRQQIITFLIAGHQTTSGLLSFALYFLVKNPRVLQKVAEEAARVLVDPVPSYKQVKQLKYVGMVLNEALRLWPVAPMFSLYAKEDTVLGGEYPLTKGDEVMVLVPQLHRDKTIWGDDVEEFRPERFENPSAIPQHAFKPFGNGQRACIGQQFALHSATLVLGMMLKHFDFEDHTNYELVIKESRTLKPEGFVVKAKSKGIPLGGIPSPSTEQKFKKVRKKAENAHNTPLLVLYGSNAGTAEGTARDLADIAVSKGFAPQVATLDSHAGNLPREGAVLIVTASYNGHPPDNAKQFVDWLDQASADEVKGVRYSVFGCGDKNWAGTYQKVPAFIDETLAAKGAENIAKRGEADASDDFEGAYEEWRDHMWSDVAAYFGLDIENSEDNKSTLSLQFVDSAADMPLAKMHGAFSTNVVASKELQQPGSARSTRHLEIELPKEASYQEGDHLGVIPRYYEGIVNRVTQRFGLSASQLIRLEAEEEKLAHLPLAKTVSVEELLQYVELQDPVTRTQLRAMAAKTVCPPHKVELEALLGKQAYKETVLAKRLTMLELLEKYPACEMSFSEFIALLPSIRPRYYSISSSPRVDLKQASITVSVVSGPAWSGYGEYKGIASNYLAELQEGDTITCFISTPQSEFTLPKDPETPLIMVGPGTGVAPFRGFVQARKQLKEQGQSLGEAHLYFGCRSPHEDYLYQEELENAQSEGIILLHTAFSRMPNQPKTYVQHVMEQDGKKLIELLDQGAHFYICGDGIQMAPAVEATLMKSYADVHQVSEADARLWLQQLEEKGRYAKDVWLG

SEQ ID NO: 1271 - DNA, 3147 bp, synthetic construct
  misc_feature 1..3147: note = variant of P450 oxidase from Bacillus megaterium
  source 1..3147: mol_type = other DNA
atgacaattaaggaaatgcctcagcctaagacgtttggagaacttaaaaatttaccgttattaaatacagataaaccggttcaagctttgatgcgtattgcggatgaattaggagaaatctttaaattcgaggcgcctggtagcgtaacgcgctatttatcaagtcagcgtctaattaaagaagcatgcgatgaatcacgctttgataaaaacttaagtcaagggcttaaatttgcacgtgattttgttggagacgggctggttacaagctggacgcatgaaccgaattggaaaaaagcgcataatatcttagttccaagctttagtcagcgcgcaatggggcgttatcatgcgatgatggtcgatatcgccgtgcagcttgttcaaaagtgggagcgtctaaatgcagatgagcatattgaagtatcggaagacatgacacgtttaacgcttgatacaattggtctttgcctgtttaactatcgctttaacagcttttaccgagatacgcctcatccatttattgtgagtgtggttcgtgcactggatgaagtaatgaacaagctgcagcgagcaaatccagacgacccagcttatgatgaaaacaagcgccagtgtcaagaagatatcaaggtgatgaacgactatgtagataaaattattgcagatcgcaaaaacaggggtgaacaaagtcatgatttattaacccagatgctaaacggaaaagatccagaaacgggtgagccgcttgatgacgggaatattcgtcagcaaattattacattcttaattgcgggacaccaaacgacaagtggtcttttatcatttgcgctgtatttcttagtgaaaaatccacgtgtattacaaaaagtagcagaagaagcagcacgagttctagtagatcctgttccaagctacaaacaagtcaaacagcttaaatatgttggcatggtcttaaacgaagcgctgcgcttatggccagtagcgcctatgttttccctatatgcaaaagaagatacggtgcttggaggagaatatcctttaacgaaaggcgacgaagtaatggttctggtgcctcagcttcaccgtgataaaacaatttggggagacgatgtggaggagttccgtccagagcgttttgaaaatccaagtgcgattccgcagcatgcgtttaaaccgtttggaaacggtcagcgtgcgtgtatcggtcagcagttcgctcttcatagtgcaacgctggtacttggtatgatgctaaaacactttgactttgaagatcatacaaactacgagctcgtcattaaagaatcgcggacgttaaaacctgaaggctttgtggtaaaagcaaaatcgaaaggcattccgcttggcggtattccttcacctagcactgaacagtctgctaaaaaagtacgcctgaaggcagaaaacgctcataatacgccgctgcttgtgctatacggttcaaatgcgggaacagctgaaggaacggcgcgtgatttagcagatattgcaatgagcaaaggatttgcaccgcaggtcgcaacgcttgattcacacgccggtaatcttccgcgcgaaggagctgtattaattgtaacggcgtcttataacggtcatccgcctgataacgcaaagcaatttgtcgattggttagaccaagcgtctgcggatgaagtaaaaggcgttcgctactccgtatttggatgcggcgataaaaattgggcggggacgtatcaaaaagtgcctgcttttatcgatgaaacgcttgccgctaaaggggcagaaaacatcgctaagcgcggtgaagcagatgcaagcgacgactttgaaggcgcgtatgaagaatggcgtgatcatatgtggagtgacgtagcagcctactttggtctcgacattgaaaacagtgaagataataaatctactctttcacttcaatttgtcgacagcgcggcggatatgcctcttgcgaaaatgcacggtgcgttttcaacgaacgtcgtagcaagcaaagaacttcaacagcctggcagtgcacgaagcacgcgacatcttgaaattgaacttccaaaagaagcttcttatcaagaaggagatcatttaggtgttattcctcgctattatgaaggaatagtaaaccgtgtaacacagaggttcggcctaagcgcatcacagctgatccgtctggaagcagaagaagaaaaattagctcatttgccactcgctaaaacagtatccgtagaagagcttctgcaatacgtggagcttcaagatcctgttacgcgcacgcagcttcgcgcaatggctgctaaaacggtctgcccgccgcataaagtagagcttgaagccttgcttggcaagcaagcctataaagaacaggtgctggcaaaacgtttaacaatgcttgaactgcttgaaaaatacccggcgtgtgaaatgagtttcagcgaatttatcgcccttctgccaagcatacgcccgcgctattactcgatttcttcatcacctcgtgtcgatctgaaacaagcaagcatcacggtcagcgttgtcagcggaccggcgtggagcggatatggagaatataaaggaattgcgtcgaactatcttgctgagctgcaagaaggagatacgattacgtgctttatttccacaccgcagtcagagtttacgctgccaaaagaccctgaaacgccgcttatcatggtcggaccgggaacaggcgtcgcgccgtttagaggctttgtgcaggcgcgcaaacagctaaaagaacaaggacagtcacttggagaagcacatttatacttcggctgccgttcacctcatgaagactatctgtatcaagaagagcttgaaaacgcccaaagcgaaggcatcattctgcttcataccgctttttctcgcatgccgaatcagccgaaaacatacgttcagcacgtaatggaacaagacggcaagaaattgattgaacttcttgatcaaggagcgcacttctatatttgcggagacggaattcaaatggcacctgccgttgaagcaacgcttatgaaaagctatgctgacgttcaccaagtgtcggaagcagacgctcgcttatggctgcagcagctagaagaaaaaggccgatacgcaaaagacgtgtggctgggg

SEQ ID NO: 1272 - protein, 1049 aa, synthetic construct
  REGION 1..1049: note = variant of P450 oxidase from Bacillus megaterium
MTIKEMPQPKTFGELKNLPLLNTDKPVQALMRIADELGEIFKFEAPGSVTRYLSSQRLIKEACDESRFDKNLSQGLKFARDFVGDGLVTSWTHEPNWKKAHNILVPSFSQRAMGRYHAMMVDIAVQLVQKWERLNADEHIEVSEDMTRLTLDTIGLCLFNYRFNSFYRDTPHPFIVSVVRALDEVMNKLQRANPDDPAYDENKRQCQEDIKVMNDYVDKIIADRKNRGEQSHDLLTQMLNGKDPETGEPLDDGNIRQQIITFLIAGHQTTSGLLSFALYFLVKNPRVLQKVAEEAARVLVDPVPSYKQVKQLKYVGMVLNEALRLWPVAPMFSLYAKEDTVLGGEYPLTKGDEVMVLVPQLHRDKTIWGDDVEEFRPERFENPSAIPQHAFKPFGNGQRACIGQQFALHSATLVLGMMLKHFDFEDHTNYELVIKESRTLKPEGFVVKAKSKGIPLGGIPSPSTEQSAKKVRLKAENAHNTPLLVLYGSNAGTAEGTARDLADIAMSKGFAPQVATLDSHAGNLPREGAVLIVTASYNGHPPDNAKQFVDWLDQASADEVKGVRYSVFGCGDKNWAGTYQKVPAFIDETLAAKGAENIAKRGEADASDDFEGAYEEWRDHMWSDVAAYFGLDIENSEDNKSTLSLQFVDSAADMPLAKMHGAFSTNVVASKELQQPGSARSTRHLEIELPKEASYQEGDHLGVIPRYYEGIVNRVTQRFGLSASQLIRLEAEEEKLAHLPLAKTVSVEELLQYVELQDPVTRTQLRAMAAKTVCPPHKVELEALLGKQAYKEQVLAKRLTMLELLEKYPACEMSFSEFIALLPSIRPRYYSISSSPRVDLKQASITVSVVSGPAWSGYGEYKGIASNYLAELQEGDTITCFISTPQSEFTLPKDPETPLIMVGPGTGVAPFRGFVQARKQLKEQGQSLGEAHLYFGCRSPHEDYLYQEELENAQSEGIILLHTAFSRMPNQPKTYVQHVMEQDGKKLIELLDQGAHFYICGDGIQMAPAVEATLMKSYADVHQVSEADARLWLQQLEEKGRYAKDVWLG

SEQ ID NO: 1273 - DNA, 3147 bp, synthetic construct
  misc_feature 1..3147: note = variant of P450 oxidase from Bacillus megaterium
  source 1..3147: mol_type = other DNA
atgacaattaaggaaatgcctcagcctaagacgtttggagaacttaaaaatttaccgttattaaatacagataaaccggttcaagctttgatgcgtattgcggatgaattaggagaaatctttaaattcgaggcgcctggtagcgtaacgcgctatttatcaagtcagcgtctaattaaagaagcatgcgatgaatcacgctttgataaaaacttaagtcaagggcttaaatttgcacgtgattttgttggagacgggctggttacaagctggacgcatgaaccgaattggaaaaaagcgcataatatcttagttccaagctttagtcagcgcgcaatggggcgttatcatgcgatgatggtcgatatcgccgtgcagcttgttcaaaagtgggagcgtctaaatgcagatgagcatattgaagtatcggaagacatgacacgtttaacgcttgatacaattggtctttgcctgtttaactatcgctttaacagcttttaccgagatacgcctcatccatttattgtgagtgtggttcgtgcactggatgaagtaatgaacaagctgcagcgagcaaatccagacgacccagcttatgatgaaaacaagcgccagtgtcaagaagatatcaaggtgatgaacgactatgtagataaaattattgcagatcgcaaaaacaggggtgaacaaagtcatgatttattaacccagatgctaaacggaaaagatccagaaacgggtgagccgcttgatgacgggaatattcgtcagcaaattattacattcttaattgcgggacaccaaacgacaagtggtcttttatcatttgcgctgtatttcttagtgaaaaatccacgtgtattacaaaaagtagcagaagaagcagcacgagttctagtagatcctgttccaagctacaaacaagtcaaacagcttaaatatgttggcatggtcttaaacgaagcgctgcgcttatggccagtagcgcctatgttttccctatatgcaaaagaagatacggtgcttggaggagaatatcctttaacgaaaggcgacgaagtaatggttctggtgcctcagcttcaccgtgataaaacaatttggggagacgatgtggaggagttccgtccagagcgttttgaaaatccaagtgcgattccgcagcatgcgtttaaaccgtttggaaacggtcagcgtgcgtgtatcggtcagcagttcgctcttcatagtgcaacgctggtacttggtatgatgctaaaacactttgactttgaagatcatacaaactacgagctcgttattaaagaatcgcggacgttaaaacctgaaggctttgtggtaaaagcaaaatcgaaaggcattccgcttggcggtattccttcacctgcgactgaacagagtgctaaaaaagtacgcaaaaaggcagaaaacgctcataatacgccgctgcttgtgctatacggttcaaatgcgggaacagctgaaggaacggcgcgtgatttagcagatattgcaatgagcaaaggatttgcaccgcaggtcgcaacgcttgattcacacgccggtaatcttccgcgcgaaggagctgtattaattgtaacggcgtcttataacggtcatccgcctgataacgcaaagcaatttgtcgattggttagaccaagcgtctgcggatgaagtaaaaggcgttcgctactccgtatttggatgcggcgataaaaattgggcggggacgtatcaaaaagtgcctgcttttatcgatgaaacgcttgccgctaaaggggcagaaaacatcgctaagcgcggtgaagcagatgcaagcgacgactttgaaggcgcgtatgaagaatggcgtgatcatatgtggagtgacgtagcagcctactttggtctcgacattgaaaacagtgaagataataaatctactctttcacttcaatttgtcgacagcgcggcggatatgcctcttgcgaaaatgcacggtgcgttttcaacgaacgtcgtagcaagcaaagaacttcaacagcctggcagtgcacgaagcacgcgacatcttgaaattgaacttccaaaagaagcttcttatcaagaaggagatcatttaggtgttattcctcgctattatgaaggaatagtaaaccgtgtaacacagaggttcggcctaagcgcatcacagctgatccgtctggaagcagaagaagaaaaattagctcatttgccactcgctaaaacagtatccgtagaagagcttctgcaatacgtggagcttcaagatcctgttacgcgcacgcagcttcgcgcaatggctgctaaaacggtctgcccgccgcataaagtagagcttgaagccttgcttggcaagcaagcctataaagaaacggtgctggcaaaacgtttaacaatgcttgaactgcttgaaaaatacccggcgtgtgaaatgagtttcagcgaatttatcgcccttctgccaagcatacgcccgcgctattactcgatttcttcatcacctcgtgtcgatctgaaacaagcaagcatcacggtcagcgttgtcagcggaccggcgtggagcggatatggagaatataaaggaattgcgtcgaactatcttgctgagctgcaagaaggagatacgattacgtgctttatttccacaccgcagtcagagtttacgctgccaaaagaccctgaaacgccgcttatcatggtcggaccgggaacaggcgtcgcgccgtttagaggctttgtgcaggcgcgcaaacagctaaaagaacaaggacagtcacttggagaagcacatttatacttcggctgccgttcacctcatgaagactatctgtatcaagaagagcttgaaaacgcccaaagcgaaggcatcattctgcttcataccgctttttctcgcatgccgaatcagccgaaaacatacgttcagcacgtaatggaacaagacggcaagaaattgattgaacttcttgatcaaggagcgcacttctatatttgcggagacggaattcaaatggcacctgccgttgaagcaacgcttatgaaaagctatgctgacgttcaccaagtgagtgaagcagacgctcgcttatggctgcagcagctagaagaaaaaggccgatacgcaaaagacgtgtggctgggg

SEQ ID NO: 1274 - protein, 1049 aa, synthetic construct
  REGION 1..1049: note = variant of P450 oxidase from Bacillus megaterium
MTIKEMPQPKTFGELKNLPLLNTDKPVQALMRIADELGEIFKFEAPGSVTRYLSSQRLIKEACDESRFDKNLSQGLKFARDFVGDGLVTSWTHEPNWKKAHNILVPSFSQRAMGRYHAMMVDIAVQLVQKWERLNADEHIEVSEDMTRLTLDTIGLCLFNYRFNSFYRDTPHPFIVSVVRALDEVMNKLQRANPDDPAYDENKRQCQEDIKVMNDYVDKIIADRKNRGEQSHDLLTQMLNGKDPETGEPLDDGNIRQQIITFLIAGHQTTSGLLSFALYFLVKNPRVLQKVAEEAARVLVDPVPSYKQVKQLKYVGMVLNEALRLWPVAPMFSLYAKEDTVLGGEYPLTKGDEVMVLVPQLHRDKTIWGDDVEEFRPERFENPSAIPQHAFKPFGNGQRACIGQQFALHSATLVLGMMLKHFDFEDHTNYELVIKESRTLKPEGFVVKAKSKGIPLGGIPSPATEQSAKKVRKKAENAHNTPLLVLYGSNAGTAEGTARDLADIAMSKGFAPQVATLDSHAGNLPREGAVLIVTASYNGHPPDNAKQFVDWLDQASADEVKGVRYSVFGCGDKNWAGTYQKVPAFIDETLAAKGAENIAKRGEADASDDFEGAYEEWRDHMWSDVAAYFGLDIENSEDNKSTLSLQFVDSAADMPLAKMHGAFSTNVVASKELQQPGSARSTRHLEIELPKEASYQEGDHLGVIPRYYEGIVNRVTQRFGLSASQLIRLEAEEEKLAHLPLAKTVSVEELLQYVELQDPVTRTQLRAMAAKTVCPPHKVELEALLGKQAYKETVLAKRLTMLELLEKYPACEMSFSEFIALLPSIRPRYYSISSSPRVDLKQASITVSVVSGPAWSGYGEYKGIASNYLAELQEGDTITCFISTPQSEFTLPKDPETPLIMVGPGTGVAPFRGFVQARKQLKEQGQSLGEAHLYFGCRSPHEDYLYQEELENAQSEGIILLHTAFSRMPNQPKTYVQHVMEQDGKKLIELLDQGAHFYICGDGIQMAPAVEATLMKSYADVHQVSEADARLWLQQLEEKGRYAKDVWLG

SEQ ID NO: 1275 - DNA, 3147 bp, synthetic construct
  misc_feature 1..3147: note = variant of P450 oxidase from Bacillus megaterium
  source 1..3147: mol_type = other DNA
atgacaattaaggaaatgcctcagcctaagacgtttggagaacttaaaaatttaccgttattaaatacagataaaccggttcaagctttgatgcgtattgcggatgaattaggagaaatctttaaattcgaggcgcctggtagcgtaacgcgctatttatcaagtcagcgtctaattaaagaagcatgcgatgaatcacgctttgataaaaacttaagtcaagggcttaaatttgcacgtgattttgttggagacgggctggttacaagctggacgcatgaaccgaattggaaaaaagcgcataatatcttagttccaagctttagtcagcgcgcaatggggcgttatcatgcgatgatggtcgatatcgccgtgcagcttgttcaaaagtgggagcgtctaaatgcagatgagcatattgaagtatcggaagacatgacacgtttaacgcttgatacaattggtctttgcctgtttaactatcgctttaacagcttttaccgagatacgcctcatccatttattgtgagtgtggttcgtgcactggatgaagtaatgaacaagctgcagcgagcaaatccagacgacccagcttatgatgaaaacaagcgccagtgtcaagaagatatcaaggtgatgaacgactatgtagataaaattattgcagatcgcaaaaacaggggtgaacaaagtcatgatttattaacccagatgctaaacggaaaagatccagaaacgggtgagccgcttgatgacgggaatattcgtcagcaaattattacattcttaattgcgggacaccaaacgacaagtggtcttttatcatttgcgctgtatttcttagtgaaaaatccacgtgtattacaaaaggtagcagaagaagcagcacgagttctagtagatcctgttccaagctacaaacaagtcaaacagcttaaatatgttggcatggtcttaaacgaagcgctgcgcttatggccagtagcgcctatgttttccctatatgcaaaagaagatacggtgcttggaggagaatatcctttaacgaaaggcgacgaagtaatggttctggtgcctcagcttcaccgtgataaaacaatttggggagacgatgtggaggagttccgtccagagcgttttgaaaatccaagtgcgattccgcagcatgcgtttaaaccgtttggaaacggtcagcgtgcgtgtatcggtcagcagttcgctcttcatagtgcaacgctggtacttggtatgatgctaaaacactttgactttgaagatcatacaaactacgagctcaagattaaagaatcgcggacgttaaaacctgaaggctttgtggtaaaagcaaaatcgaaaggcattccgcttggcggtattccttcacctagcactgaacagtctgctaaaaaagtacgcaaaaaggcagaaaacgctcataatacgccgctgcttgtgctatacggttcaaatgcgggaacagctgaaggaacggcgcgtgatttagcagatattgcagtgagcaaaggatttgcaccgcaggtcgcaacgcttgattcacacgccggtaatcttccgcgcgaaggagctgtattaattgtaacggcgtcttataacggtcatccgcctgataacgcaaagcaatttgtcgattggttagaccaagcgtctgcggatgaagtaaaaggcgttcgctactccgtatttggatgcggcgataaaaattgggcggggacgtatcaaaaagtgcctgcttttatcgatgaaacgcttgccgctaaaggggcagaaaacatcgctaagcgcggtgaagcagatgcaagcgacgactttgaaggcgcgtatgaagaatggcgtgatcatatgtggagtgacgtagcagcctactttggtctcgacattgaaaacagtgaagataataaatctactctttcacttcaatttgtcgacagcgcggcggatatgcctcttgcgaaaatgcacggtgcgttttcaacgaacgtcgtagcaagcaaagaacttcaacagcctggcagtgcacgaagcacgcgacatcttgaaattgaacttccaaaagaagcttcttatcaagaaggagatcatttaggtgttattcctcgctattatgaaggaatagtaaaccgtgtaacacagaggttcggcctaagcgcatcacagctgatccgtctggaagcagaagaagaaaaattagctcatttgccactcgctaaaacagtatccgtagaagagcttctgcaatacgtggagcttcaagatcctgttacgcgcacgcagcttcgcgcaatggctgctaaaacggtctgcccgccgcataaagtagagcttgaagccttgcttggcaagcaagcctataaagaacaggtgctggcaaaacgtttaacaatgcttgaactgcttgaaaaatacccggcgtgtgaaatgagtttcagcgaatttatcgcccttctgccaagcatacgcccgcgctattactcgatttcttcatcacctcgtgtcgatctgaaacaagcaagcatcacggtcagcgttgtcagcggaccggcgtggagcggatatggagaatataaaggaattgcgtcgaactatcttgctgagctgcaagaaggagatacgattacgtgctttatttccacaccgcagtcagagtttacgctgccaaaagaccctgaaacgccgcttatcatggtcggaccgggaacaggcgtcgcgccgtttagaggctttgtgcaggcgcgcaaacagctaaaagaacaaggacagtcacttggagaagcacatttatacttcggctgccgttcacctcatgaagactatctgtatcaagaagagcttgaaaacgcccaaagcgaaggcatcattctgcttcataccgctttttctcgcatgccgaatcagccgaaaacatacgttcagcacgtaatggaacaagacggcaagaaattgattgaacttcttgatcaaggagcgcacttctatatttgcggagacggaattcaaatggcacctgccgttgaagcaacgcttatgaaaagctatgctgacgttcaccaagtgacggaagcagacgctcgcttatggctgcagcagctagaagaaaaaggccgatacgcaaaagacgtgtggctgggg

SEQ ID NO: 1276 - protein, 1049 aa, synthetic construct
  REGION 1..1049: note = variant of P450 oxidase from Bacillus megaterium
MTIKEMPQPKTFGELKNLPLLNTDKPVQALMRIADELGEIFKFEAPGSVTRYLSSQRLIKEACDESRFDKNLSQGLKFARDFVGDGLVTSWTHEPNWKKAHNILVPSFSQRAMGRYHAMMVDIAVQLVQKWERLNADEHIEVSEDMTRLTLDTIGLCLFNYRFNSFYRDTPHPFIVSVVRALDEVMNKLQRANPDDPAYDENKRQCQEDIKVMNDYVDKIIADRKNRGEQSHDLLTQMLNGKDPETGEPLDDGNIRQQIITFLIAGHQTTSGLLSFALYFLVKNPRVLQKVAEEAARVLVDPVPSYKQVKQLKYVGMVLNEALRLWPVAPMFSLYAKEDTVLGGEYPLTKGDEVMVLVPQLHRDKTIWGDDVEEFRPERFENPSAIPQHAFKPFGNGQRACIGQQFALHSATLVLGMMLKHFDFEDHTNYELKIKESRTLKPEGFVVKAKSKGIPLGGIPSPSTEQSAKKVRKKAENAHNTPLLVLYGSNAGTAEGTARDLADIAVSKGFAPQVATLDSHAGNLPREGAVLIVTASYNGHPPDNAKQFVDWLDQASADEVKGVRYSVFGCGDKNWAGTYQKVPAFIDETLAAKGAENIAKRGEADASDDFEGAYEEWRDHMWSDVAAYFGLDIENSEDNKSTLSLQFVDSAADMPLAKMHGAFSTNVVASKELQQPGSARSTRHLEIELPKEASYQEGDHLGVIPRYYEGIVNRVTQRFGLSASQLIRLEAEEEKLAHLPLAKTVSVEELLQYVELQDPVTRTQLRAMAAKTVCPPHKVELEALLGKQAYKEQVLAKRLTMLELLEKYPACEMSFSEFIALLPSIRPRYYSISSSPRVDLKQASITVSVVSGPAWSGYGEYKGIASNYLAELQEGDTITCFISTPQSEFTLPKDPETPLIMVGPGTGVAPFRGFVQARKQLKEQGQSLGEAHLYFGCRSPHEDYLYQEELENAQSEGIILLHTAFSRMPNQPKTYVQHVMEQDGKKLIELLDQGAHFYICGDGIQMAPAVEATLMKSYADVHQVTEADARLWLQQLEEKGRYAKDVWLG

SEQ ID NO: 1277 - DNA, 3147 bp, synthetic construct
  misc_feature 1..3147: note = variant of P450 oxidase from Bacillus megaterium
  source 1..3147: mol_type = other DNA
atgacaattaaggaaatgcctcagcctaagacgtttggagaacttaaaaatttaccgttattaaatacagataaaccggttcaagctttgatgcgtattgcggatgaattaggagaaatctttaaattcgaggcgcctggtagcgtaacgcgctatttatcaagtcagcgtctaattaaagaagcatgcgatgaatcacgctttgataaaaacttaagtcaagggcttaaatttgcacgtgattttgttggagacgggctggttacaagctggacgcatgaaccgaattggaaaaaagcgcataatatcttagttccaagctttagtcagcgcgcaatggggcgttatcatgcgatgatggtcgatatcgccgtgcagcttgttcaaaagtgggagcgtctaaatgcagatgagcatattgaagtatcggaagacatgacacgtttaacgcttgatacaattggtctttgcctgtttaactatcgctttaacagcttttaccgagatacgcctcatccatttattgtgagtgtggttcgtgcactggatgaagtaatgaacaagctgcagcgagcaaatccagacgacccagcttatgatgaaaacaagcgccagtgtcaagaagatatcaaggtgatgaacgactatgtagataaaattattgcagatcgcaaaaacaggggtgaacaaagtcatgatttattaacccagatgctaaacggaaaagatccagaaacgggtgagccgcttgatgacgggaatattcgtcagcaaattattacattcttaattgcgggacaccaaacgacaagtggtcttttatcatttgcgctgtatttcttagtgaaaaatccacgtgtattacaaacggtagcagaagaagcagcacgagttctagtagatcctgttccaagctacaaacaagtcaaacagcttaaatatgttggcatggtcttaaacgaagcgctgcgcttatggccagtagcgcctatgttttccctatatgcaaaagaagatacggtgcttggaggagaatatcctttaacgaaaggcgacgaagtaatggttctggtgcctcagcttcaccgtgataaaaccatttggggagacgatgtggaggagttccgtccagagcgttttgaaaatccaagtgcgattccgcagcatgcgtttaaaccgtttggaaacggtcagcgtgcgtgtatcggtcagcagttcgctcttcatagtgcaacgctggtacttggtatgatgctaaaacactttgactttgaagatcatacaaactacgagctcgttattaaagaatcgcggacgttaaaacctgaaggctttgtggtaaaagcaaaatcgaaaggcattccgcttggcggtattccttcacctagcactgaacagtctgctaaaaaagtacgcaaaaaggcagaaaacgctcataatacgccgctgcttgtgctatacggttcaaatgcgggaacagctgaaggaacggcgcgtgatttagcagatattgcaatgagcaaaggatttgcaccgcaggtcgcaacgcttgattcacacgccggtaatcttccgcgcgaaggagctgtattaattgtaacggcgtcttataacggtcatccgcctgataacgcaaagcaatttgtcgattggttagaccaagcgtctgcggatgaagtaaaaggcgttcgctactccgtatttggatgcggcgataaaaattgggcggggacgtatcaaaaagtgcctgcttttatcgatgaaacgcttgccgctaaaggggcagaaaacatcgctaagcgcggtgaagcagatgcaagcgacgactttgaaggcgcgtatgaagaatggcgtgatcatatgtggagtgacgtagcagcctactttggtctcgacattgaaaacagtgaagataataaatctactctttcacttcaatttgtcgacagcgcggcggatatgcctcttgcgaaaatgcacggtgcgttttcaacgaacgtcgtagcaagcaaagaacttcaacagcctggcagtgcacgaagcacgcgacatcttgaaattgaacttccaaaagaagcttcttatcaagaaggagatcatttaggtgttattcctcgctattatgaaggaatagtaaaccgtgtaacacagaggttcggcctaagcgcatcacagctgatccgtctggaagcagaagaagaaaaattagctcatttgccactcgctaaaacagtatccgtagaagagcttctgcaatacgtggagcttcaagatcctgttacgcgcacgcagcttcgcgcaatggctgctaaaacggtctgcccgccgcataaagtagagcttgaagccttgcttggcaagcaagcctataaagaaacggtgctggcaaaacgtttaacaatgcttgaactgcttgaaaaatacccggcgtgtgaaatgagtttcagcgaatttatcgcccttctgccaagcatacgcccgcgctattactcgatttcttcatcacctcgtgtcgatctgaaacaagcaagcatcacggtcagcgttgtcagcggaccggcgtggagcggatatggagaatataaaggaattgcgtcgaactatcttgctgagctgcaagaaggagatacgattacgtgctttatttccacaccgcagtcagagtttacgctgccaaaagaccctgaaacgccgcttatcatggtcggaccgggaacaggcgtcgcgccgtttagaggctttgtgcaggcgcgcaaacagctaaaagaacaaggacagtcacttggagaagcacatttatacttcggctgccgttcacctcatgaagactatctgtatcaagaagagcttgaaaacgcccaaagcgaaggcatcattctgcttcataccgctttttctcgcatgccgaatcagccgaaaacatacgttcagcacgtaatggaacaagacggcaagaaattgattgaacttcttgatcaaggagcgcacttctatatttgcggagacggaattcaaatggcacctgccgttgaagcaacgcttatgaaaagctatgctgacgttcaccaagtgtcggaagcagacgctcgcttatggctgcagcagctagaagaaaaaggccgatacgcaaaagacgtgtggctgggg

SEQ ID NO: 1278 - protein, 1049 aa, synthetic construct
  REGION 1..1049: note = variant of P450 oxidase from Bacillus megaterium
MTIKEMPQPKTFGELKNLPLLNTDKPVQALMRIADELGEIFKFEAPGSVTRYLSSQRLIKEACDESRFDKNLSQGLKFARDFVGDGLVTSWTHEPNWKKAHNILVPSFSQRAMGRYHAMMVDIAVQLVQKWERLNADEHIEVSEDMTRLTLDTIGLCLFNYRFNSFYRDTPHPFIVSVVRALDEVMNKLQRANPDDPAYDENKRQCQEDIKVMNDYVDKIIADRKNRGEQSHDLLTQMLNGKDPETGEPLDDGNIRQQIITFLIAGHQTTSGLLSFALYFLVKNPRVLQTVAEEAARVLVDPVPSYKQVKQLKYVGMVLNEALRLWPVAPMFSLYAKEDTVLGGEYPLTKGDEVMVLVPQLHRDKTIWGDDVEEFRPERFENPSAIPQHAFKPFGNGQRACIGQQFALHSATLVLGMMLKHFDFEDHTNYELVIKESRTLKPEGFVVKAKSKGIPLGGIPSPSTEQSAKKVRKKAENAHNTPLLVLYGSNAGTAEGTARDLADIAMSKGFAPQVATLDSHAGNLPREGAVLIVTASYNGHPPDNAKQFVDWLDQASADEVKGVRYSVFGCGDKNWAGTYQKVPAFIDETLAAKGAENIAKRGEADASDDFEGAYEEWRDHMWSDVAAYFGLDIENSEDNKSTLSLQFVDSAADMPLAKMHGAFSTNVVASKELQQPGSARSTRHLEIELPKEASYQEGDHLGVIPRYYEGIVNRVTQRFGLSASQLIRLEAEEEKLAHLPLAKTVSVEELLQYVELQDPVTRTQLRAMAAKTVCPPHKVELEALLGKQAYKETVLAKRLTMLELLEKYPACEMSFSEFIALLPSIRPRYYSISSSPRVDLKQASITVSVVSGPAWSGYGEYKGIASNYLAELQEGDTITCFISTPQSEFTLPKDPETPLIMVGPGTGVAPFRGFVQARKQLKEQGQSLGEAHLYFGCRSPHEDYLYQEELENAQSEGIILLHTAFSRMPNQPKTYVQHVMEQDGKKLIELLDQGAHFYICGDGIQMAPAVEATLMKSYADVHQVSEADARLWLQQLEEKGRYAKDVWLG

SEQ ID NO: 1279 - DNA, 3147 bp, synthetic construct
  misc_feature 1..3147: note = variant of P450 oxidase from Bacillus megaterium
  source 1..3147: mol_type = other DNA
atgacaattaaggaaatgcctcagcctaagacgtttggagaacttaaaaatttaccgttattaaatacagataaaccggttcaagctttgatgcgtattgcggatgaattaggagaaatctttaaattcgaggcgcctggtagcgtaacgcgctatttatcaagtcagcgtctaattaaagaagcatgcgatgaatcacgctttgataaaaacttaagtcaagggcttaaatttgcacgtgattttgttggagacgggctggttacaagctggacgcatgaaccgaattggaaaaaagcgcataatatcttagttccaagctttagtcagcgcgcaatggggcgttatcatgcgatgatggtcgatatcgccgtgcagcttgttcaaaagtgggagcgtctaaatgcagatgagcatattgaagtatcggaagacatgacacgtttaacgcttgatacaattggtctttgcctgtttaactatcgctttaacagcttttaccgagatacgcctcatccatttattgtgagtgtggttcgtgcactggatgaagtaatgaacaagctgcagcgagcaaatccagacgacccagcttatgatgaaaacaagcgccagtgtcaagaagatatcaaggtgatgaacgactatgtagataaaattattgcagatcgcaaaaacaggggtgaacaaagtcatgatttattaacccagatgctaaacggaaaagatccagaaacgggtgagccgcttgatgacgggaatattcgtcagcaaattattacattcttaattgcgggacaccaaacgacaagtggtcttttatcatttgcgctgtatttcttagtgaaaaatccacgtgtattacaaaaagtagcagaagaagcagcacgagttctagtagatcctgttccaagctacaaacaagtcaaacagcttaaatatgttggcatggtcttaaacgaagcgctgcgcttatggccagtagcgcctatgttttccctatatgcaaaagaagatacggtgcttggaggagaatatcctttaacgaaaggcgacgaagtaatggttctggtgcctcagcttcaccgtgataaaatcatttggggagacgatgtggaggagttccgtccagagcgttttgaaaatccaagtgcgattccgcagcatgcgtttaaaccgtttggaaacggtcagcgtgcgtgtatcggtcagcagttcgctcttcatagtgcaacgctggtacttggtatgatgctaaaacactttgactttgaagatcatacaaactacgagctcaagattaaagaatcgcggacgttaaaacctgaaggctttgtggtaaaagcaaaatcgaaaggcattccgcttggcggtattccttcacctagcactgaacagtctgctaaaaaagtacgcaaaaaggcagaaaacgctcataatacgccgctgcttgtgctatacggttcaaatgcgggaacagctgaaggaacggcgcgtgatttagcagatattgcaatgagcaaaggatttgcaccgcaggtcgcaacgcttgattcacacgccggtaatcttccgcgcgaaggagctgtattaattgtaacggcgtcttataacggtcatccgcctgataacgcaaagcaatttgtcgattggttagaccaagcgtctgcggatgaagtaaaaggcgttcgctactccgtatttggatgcggcgataaaaattgggcggggacgtatcaaaaagtgcctgcttttatcgatgaaacgcttgccgctaaaggggcagaaaacatcgctaagcgcggtgaagcagatgcaagcgacgactttgaaggcgcgtatgaagaatggcgtgatcatatgtggagtgacgtagcagcctactttggtctcgacattgaaaacagtgaagataataaatctactctttcacttcaatttgtcgacagcgcggcggatatgcctcttgcgaaaatgcacggtgcgttttcaacgaacgtcgtagcaagcaaagaacttcaacagcctggcagtgcacgaagcacgcgacatcttgaaattgaacttccaaaagaagcttcttatcaagaaggagatcatttaggtgttattcctcgctattatgaaggaatagtaaaccgtgtaacacagaggttcggcctaagcgcatcacagctgatccgtctggaagcagaagaagaaaaattagctcatttgccactcgctaaaacagtatccgtagaagagcttctgcaatacgtggagcttcaagatcctgttacgcgcacgcagcttcgcgcaatggctgctaaaacggtctgcccgccgcataaagtagagcttgaagccttgcttggcaagcaagcctacaaagaacaagtgctggcaaaacgtttaacaatgcttgaactgcttgaaaaatacccggcgtgtgaaatgagtttcagcgaatttatcgcccttctgccaagcatacgcccgcgctattactcgatttcttcatcacctcgtgtcgatctgaaacaagcaagcatcacggtcagcgttgtcagcggaccggcgtggagcggatatggagaatataaaggaattgcgtcgaactatcttgctgagctgcaagaaggagatacgattacgtgctttatttccacaccgcagtcagagtttacgctgccaaaagaccctgaaacgccgcttatcatggtcggaccgggaacaggcgtcgcgccgtttagaggctttgtgcaggcgcgcaaacagctaaaagaacaaggacagtcacttggagaagcacatttatacttcggctgccgttcacctcatgaagactatctgtatcaagaagagcttgaaaacgcccaaagcgaaggcatcattctgcttcataccgctttttctcgcatgccgaatcagccgaaaacatacgttcagcacgtaatggaacaagacggcaagaaattgattgaacttcttgatcaaggagcgcacttctatatttgcggagacggaattcaaatggcacctgccgttgaagcaacgcttatgaaaagctatgctgacgttcaccaagtgagtgaagcagacgctcgcttatggctgcagcagctagaagaaaaaggccgatacgcaaaagacgtgtggctgggg

SEQ ID NO: 1280 - protein, 1049 aa, synthetic construct
  REGION 1..1049: note = variant of P450 oxidase from Bacillus megaterium
MTIKEMPQPKTFGELKNLPLLNTDKPVQALMRIADELGEIFKFEAPGSVTRYLSSQRLIKEACDESRFDKNLSQGLKFARDFVGDGLVTSWTHEPNWKKAHNILVPSFSQRAMGRYHAMMVDIAVQLVQKWERLNADEHIEVSEDMTRLTLDTIGLCLFNYRFNSFYRDTPHPFIVSVVRALDEVMNKLQRANPDDPAYDENKRQCQEDIKVMNDYVDKIIADRKNRGEQSHDLLTQMLNGKDPETGEPLDDGNIRQQIITFLIAGHQTTSGLLSFALYFLVKNPRVLQKVAEEAARVLVDPVPSYKQVKQLKYVGMVLNEALRLWPVAPMFSLYAKEDTVLGGEYPLTKGDEVMVLVPQLHRDKIIWGDDVEEFRPERFENPSAIPQHAFKPFGNGQRACIGQQFALHSATLVLGMMLKHFDFEDHTNYELKIKESRTLKPEGFVVKAKSKGIPLGGIPSPSTEQSAKKVRKKAENAHNTPLLVLYGSNAGTAEGTARDLADIAMSKGFAPQVATLDSHAGNLPREGAVLIVTASYNGHPPDNAKQFVDWLDQASADEVKGVRYSVFGCGDKNWAGTYQKVPAFIDETLAAKGAENIAKRGEADASDDFEGAYEEWRDHMWSDVAAYFGLDIENSEDNKSTLSLQFVDSAADMPLAKMHGAFSTNVVASKELQQPGSARSTRHLEIELPKEASYQEGDHLGVIPRYYEGIVNRVTQRFGLSASQLIRLEAEEEKLAHLPLAKTVSVEELLQYVELQDPVTRTQLRAMAAKTVCPPHKVELEALLGKQAYKEQVLAKRLTMLELLEKYPACEMSFSEFIALLPSIRPRYYSISSSPRVDLKQASITVSVVSGPAWSGYGEYKGIASNYLAELQEGDTITCFISTPQSEFTLPKDPETPLIMVGPGTGVAPFRGFVQARKQLKEQGQSLGEAHLYFGCRSPHEDYLYQEELENAQSEGIILLHTAFSRMPNQPKTYVQHVMEQDGKKLIELLDQGAHFYICGDGIQMAPAVEATLMKSYADVHQVSEADARLWLQQLEEKGRYAKDVWLG

SEQ ID NO: 1281 - DNA, 3147 bp, synthetic construct
  misc_feature 1..3147: note = variant of P450 oxidase from Bacillus megaterium
  source 1..3147: mol_type = other DNA
atgacaattaaggaaatgcctcagcctaagacgtttggagaacttaaaaatttaccgttattaaatacagataaaccggttcaagctttgatgcgtattgcggatgaattaggagaaatctttaaattcgaggcgcctggtagcgtaacgcgctatttatcaagtcagcgtctaattaaagaagcatgcgatgaatcacgctttgataaaaacttaagtcaagggcttaaatttgcacgtgattttgttggagacgggctggttacaagctggacgcatgaaccgaattggaaaaaagcgcataatatcttagttccaagctttagtcagcgcgcaatggggcgttatcatgcgatgatggtcgatatcgccgtgcagcttgttcaaaagtgggggcgtctaaatgcagatgagcatattgaagtatcggaagacatgacacgtttaacgcttgatacaattggtctttgcctgtttaactatcgctttaacagcttttaccgagatacgcctcatccatttattgtgagtgtggttcgtgcactggatgaagtaatgaacaagctgcagcgagcaaatccagacgacccagcttatgatgaaaacaagcgccagtgtcaagaagatatcaaggtgatgaacgactatgtagataaaattattgcagatcgcaaaaacaggggtgaacaaagtcatgatttattaacccagatgctaaacggaaaagatccagaaacgggtgagccgcttgatgacgggaatattcgtcagcaaattattacattcttaattgcgggacaccaaacgacaagtggtcttttatcatttgcgctgtatttcttagtgaaaaatccacgtgtattacaaaaggtagcagaagaagcagcacgagttctagtagatcctgttccaagctacaaacaagtcaaacagcttaaatatgttggcatggtcttaaacgaagcgctgcgcttatggccagtagcgcctatgttttccctatatgcaaaagaagatacggtgcttggaggagaatatccattaacgaaaggcgacgaagtaatggttctggtgcctcagcttcaccgtgataaaatcatttggggagacgatgtggaggagttccgtccagagcgttttgaaaatccaagtgcgattccgcagcatgcgtttaaaccgtttggaaacggtcagcgtgcgtgtatcggtcagcagttcgctcttcatagtgcaacgctggtacttggtatgatgctaaaacactttgactttgaagatcatacaaactacgagctcgtcattaaagaatcgcggacgttaaaacctgaaggctttgtggtaaaagcaaaatcgaaaggcattccgcttggcggtattccttcacctgttactgaacagggtgctaaaaaagtacgcaaaaaggcagaaaacgctcataatacgccgctgcttgtgctatacggttcaaatgcgggaacagctgaaggaacggcgcgtgatttagcagatattgcaatgagcaaaggatttgcaccgcaggtcgcaacgcttgattcacacgccggtaatcttccgcgcgaaggagctgtattaattgtaacggcgtcttataacggtcatccgcctgataacgcaaagcaatttgtcgattggttagaccaagcgtctgcggatgaagtaaaaggcgttcgctactccgtatttggatgcggcgataaaaattgggcggggacgtatcaaaaagtgcctgcttttatcgatgaaacgcttgccgctaaaggggcagaaaacatcgctaagcgcggtgaagcagatgcaagcgacgactttgaaggcgcgtatgaagaatggcgtgatcatatgtggagtgacgtagcagcctactttggtctcgacattgaaaacagtgaagataataaatctactctttcacttcaatttgtcgacagcgcggcggatatgcctcttgcgaaaatgcacgatgcgttttcaacgaacgtcgtagcaagcaaagaacttcaacagcctggcagtgcacgaagcacgcgacatcttgaaattgaacttccaaaagaagcttcttatcaagaaggagatcatttaggtgttattcctcgctattatgaaggaatagtaaaccgtgtaacacagaggttcggcctaagcgcatcacagctgatccgtctggaagcagaagaagaaaaattagctcatttgccactcgctaaaacagtatccgtagaagagcttctgcaatacgtggagcttcaagatcctgttacgcgcacgcagcttcgcgcaatggctgctaaaacggtctgcccgccgcataaagtagagcttgaagccttgcttggcaagcaagcctataaagaacaggtgctggcaaaacgtttaacaatgcttgaactgcttgaaaaatacccggcgtgtgaaatgagtttcagcgaatttatcgcccttctgccaagcatacgcccgcgctattactcgatttcttcatcacctcgtgtcgatctgaaacaagcaagcatcacggtcagcgttgtcagcggactggcgtggagcggatatggagaatataaaggaattgcgtcgaactatcttgctgagctgcaagaaggagatacgattacgtgctttatttccacaccgcagtcagagtttacgctgccaaaagaccctgaaacgccgcttatcatggtcggaccgggaacaggcgtcgcgccgtttagaggctttgtgcaggcgcgcaaacagctaaaagaacaaggacagtcacttggagaagcacatttatacttcggctgccgttcacctcatgaagactatctgtatcaagaagagcttgaaaacgcccaaagcgaaggcatcattctgcttcataccgctttttctcgcatgccgaatcagccgaaaacatacgttcagcacgtaatggaacaagacggcaagaaattgattgaacttcttgatcaaggagcgcacttctatatttgcggagacggaattcaaatggcacctgccgttgaagcaacgcttatgaaaagctatgctgacgttcaccaagtgtcggaagcagacgctcgcttatggctgcagcagctagaagaaaaaggccgatacgcaaaagacgtgtggctgggg

SEQ ID NO: 1282 - protein, 1049 aa, synthetic construct
  REGION 1..1049: note = variant of P450 oxidase from Bacillus megaterium
MTIKEMPQPKTFGELKNLPLLNTDKPVQALMRIADELGEIFKFEAPGSVTRYLSSQRLIKEACDESRFDKNLSQGLKFARDFVGDGLVTSWTHEPNWKKAHNILVPSFSQRAMGRYHAMMVDIAVQLVQKWGRLNADEHIEVSEDMTRLTLDTIGLCLFNYRFNSFYRDTPHPFIVSVVRALDEVMNKLQRANPDDPAYDENKRQCQEDIKVMNDYVDKIIADRKNRGEQSHDLLTQMLNGKDPETGEPLDDGNIRQQIITFLIAGHQTTSGLLSFALYFLVKNPRVLQKVAEEAARVLVDPVPSYKQVKQLKYVGMVLNEALRLWPVAPMFSLYAKEDTVLGGEYPLTKGDEVMVLVPQLHRDKIIWGDDVEEFRPERFENPSAIPQHAFKPFGNGQRACIGQQFALHSATLVLGMMLKHFDFEDHTNYELVIKESRTLKPEGFVVKAKSKGIPLGGIPSPVTEQGAKKVRKKAENAHNTPLLVLYGSNAGTAEGTARDLADIAMSKGFAPQVATLDSHAGNLPREGAVLIVTASYNGHPPDNAKQFVDWLDQASADEVKGVRYSVFGCGDKNWAGTYQKVPAFIDETLAAKGAENIAKRGEADASDDFEGAYEEWRDHMWSDVAAYFGLDIENSEDNKSTLSLQFVDSAADMPLAKMHDAFSTNVVASKELQQPGSARSTRHLEIELPKEASYQEGDHLGVIPRYYEGIVNRVTQRFGLSASQLIRLEAEEEKLAHLPLAKTVSVEELLQYVELQDPVTRTQLRAMAAKTVCPPHKVELEALLGKQAYKEQVLAKRLTMLELLEKYPACEMSFSEFIALLPSIRPRYYSISSSPRVDLKQASITVSVVSGLAWSGYGEYKGIASNYLAELQEGDTITCFISTPQSEFTLPKDPETPLIMVGPGTGVAPFRGFVQARKQLKEQGQSLGEAHLYFGCRSPHEDYLYQEELENAQSEGIILLHTAFSRMPNQPKTYVQHVMEQDGKKLIELLDQGAHFYICGDGIQMAPAVEATLMKSYADVHQVSEADARLWLQQLEEKGRYAKDVWLG

SEQ ID NO: 1283 - DNA, 3147 bp, synthetic construct
  misc_feature 1..3147: note = variant of P450 oxidase from Bacillus megaterium
  source 1..3147: mol_type = other DNA
atgacaattaaggaaatgcctcagcctaagacgtttggagaacttaaaaatttaccgttattaaatacagataaaccggttcaagctttgatgcgtattgcggatgaattaggagaaatctttaaattcgaggcgcctggtagcgtaacgcgctatttatcaagtcagcgtctaattaaagaagcatgcgatgaatcacgctttgataaaaacttaagtcaagggcttaaatttgcacgtgattttgttggagacgggctggttacaagctggacgcatgaaccgaattggaaaaaagcgcataatatcttagttccaagctttagtcagcgcgcaatggggcgttatcatgcgatgatggtcgatatcgccgtgcagcttgttcaaaagtgggggcgtctaaatgcagatgagcatattgaagtatcggaagacatgacacgtttaacgcttgatacaattggtctttgcctgtttaactatcgctttaacagcttttaccgagatacgcctcatccatttattgtgagtgtggttcgtgcactggatgaagtaatgaacaagctgcagcgagcaaatccagacgacccagcttatgatgaaaacaagcgccagtgtcaagaagatatcaaggtgatgaacgactatgtagataaaattattgcagatcgcaaaaacaggggtgaacaaagtcatgatttattaacccagatgctaaacggaaaagatccagaaacgggtgagccgcttgatgacgggaatattcgtcagcaaattattacattcttaattgcgggacaccaaacgacaagtggtcttttatcatttgcgctgtatttcttagtgaaaaatccacgtgtattacaaaaggtagcagaagaagcagcacgagttctagtagatcctgttccaagctacaaacaagtcaaacagcttaaatatgttggcatggtcttaaacgaagcgctgcgcttatggccagtagcgcctatgttttccctatatgcaaaagaagatacggtgcttggaggagaatatccattaacgaaaggcgacgaagtaatggttctggtgcctcagcttcaccgtgataaaatcatttggggagacgatgtggaggagttccgtccagagcgttttgaaaatccaagtgcgattccgcagcatgcgtttaaaccgtttggaaacggtcagcgtgcgtgtatcggtcagcagttcgctcttcatagtgcaacgctggtacttggtatgatgctaaaacactttgactttgaagatcatacaaactacgagctcgtcattaaagaatcgcggacgttaaaacctgaaggctttgtggtaaaagcaaaatcgaaaggcattccgcttggcggtattccttcacctgttactgaacagggtgctaaaaaagtacgcaaaaaggcagaaaacgctcataatacgccgctgcttgtgctatacggttcaaatgcgggaacagctgaaggaacggcgcgtgatttagcagatattgcaatgagcaaaggatttgcaccgcaggtcgcaacgcttgattcacacgccggtaatcttccgcgcgaaggagctgtattaattgtaacggcgtcttataacggtcatccgcctgataacgcaaagcaatttgtcgattggttagaccaagcgtctgcggatgaagtaaaaggcgttcgctactccgtatttggatgcggcgataaaaattgggcggggacgtatcaaaaagtgcctgcttttatcgatgaaacgcttgccgctaaaggggcagaaaacatcgctaagcgcggtgaagcagatgcaagcgacgactttgaaggcgcgtatgaagaatggcgtgatcatatgtggagtgacgtagcagcctactttggtctcgacattgaaaacagtgaagataataaatctactctttcacttcaatttgtcgacagcgcggcggatatgcctcttgcgaaaatgcacgatgcgttttcaacgaacgtcgtagcaagcaaagaacttcaacagcctggcagtgcacgaagcacgcgacatcttgaaattgaacttccaaaagaagcttcttatcaagaaggagatcatttaggtgttattcctcgctattatgaaggaatagtaaaccgtgtaacacagaggttcggcctaagcgcatcacagctgatccgtctggaagcagaagaagaaaaattagctcatttgccactcgctaaaacagtatccgtagaagagcttctgcaatacgtggagcttcaagatcctgttacgcgcacgcagcttcgcgcaatggctgctaaaacggtctgcccgccgcataaagtagagcttgaagccttgcttggcaagcaagcctataaagaacaggtgctggcaaaacgtttaacaatgcttgaactgcttgaaaaatacccggcgtgtgaaatgagtttcagcgaatttatcgcccttctgccaagcatacgcccgcgctattactcgatttcttcatcacctcgtgtcgatctgaaacaagcaagcatcacggtcagcgttgtcagcggaccggcgtggagcggatatggagaatataaaggaattgcgtcgaactatcttgctgagctgcaagaaggagatacgattacgtgctttatttccacaccgcagtcagagtttacgctgccaaaagaccctgaaacgccgcttatcatggtcggaccgggaacaggcgtcgcgccgtttagaggctttgtgcaggcgcgcaaacagctaaaagaacaaggacagtcacttggagaagcacatttatacttcggctgccgttcacctcatgaagactatctgtatcaagaagagcttgaaaacgcccaaagcgaaggcatcattctgcttcataccgctttttctcgcatgccgaatcagccgaaaacatacgttcagcacgtaatggaacaagacggcaagaaattgattgaacttcttgatcaaggagcgcacttctatatttgcggagacggaattcaaatggcacctgccgttgaagcaacgcttatgaaaagctatgctgacgttcaccaagtgtcggaagcagacgctcgcttatggctgcagcagctagaagaaaaaggccgatacgcaaaagacgtgtggctgggg

SEQ ID NO: 1284 - protein, 1049 aa, synthetic construct
  REGION 1..1049: note = variant of P450 oxidase from Bacillus megaterium
MTIKEMPQPKTFGELKNLPLLNTDKPVQALMRIADELGEIFKFEAPGSVTRYLSSQRLIKEACDESRFDKNLSQGLKFARDFVGDGLVTSWTHEPNWKKAHNILVPSFSQRAMGRYHAMMVDIAVQLVQKWGRLNADEHIEVSEDMTRLTLDTIGLCLFNYRFNSFYRDTPHPFIVSVVRALDEVMNKLQRANPDDPAYDENKRQCQEDIKVMNDYVDKIIADRKNRGEQSHDLLTQMLNGKDPETGEPLDDGNIRQQIITFLIAGHQTTSGLLSFALYFLVKNPRVLQKVAEEAARVLVDPVPSYKQVKQLKYVGMVLNEALRLWPVAPMFSLYAKEDTVLGGEYPLTKGDEVMVLVPQLHRDKIIWGDDVEEFRPERFENPSAIPQHAFKPFGNGQRACIGQQFALHSATLVLGMMLKHFDFEDHTNYELVIKESRTLKPEGFVVKAKSKGIPLGGIPSPVTEQGAKKVRKKAENAHNTPLLVLYGSNAGTAEGTARDLADIAMSKGFAPQVATLDSHAGNLPREGAVLIVTASYNGHPPDNAKQFVDWLDQASADEVKGVRYSVFGCGDKNWAGTYQKVPAFIDETLAAKGAENIAKRGEADASDDFEGAYEEWRDHMWSDVAAYFGLDIENSEDNKSTLSLQFVDSAADMPLAKMHDAFSTNVVASKELQQPGSARSTRHLEIELPKEASYQEGDHLGVIPRYYEGIVNRVTQRFGLSASQLIRLEAEEEKLAHLPLAKTVSVEELLQYVELQDPVTRTQLRAMAAKTVCPPHKVELEALLGKQAYKEQVLAKRLTMLELLEKYPACEMSFSEFIALLPSIRPRYYSISSSPRVDLKQASITVSVVSGPAWSGYGEYKGIASNYLAELQEGDTITCFISTPQSEFTLPKDPETPLIMVGPGTGVAPFRGFVQARKQLKEQGQSLGEAHLYFGCRSPHEDYLYQEELENAQSEGIILLHTAFSRMPNQPKTYVQHVMEQDGKKLIELLDQGAHFYICGDGIQMAPAVEATLMKSYADVHQVSEADARLWLQQLEEKGRYAKDVWLG

SEQ ID NO: 1285 - DNA, 3147 bp, synthetic construct
  misc_feature 1..3147: note = variant of P450 oxidase from Bacillus megaterium
  source 1..3147: mol_type = other DNA
atgacaattaaggaaatgcctcagcctaagacgtttggagaacttaaaaatttaccgttattaaatacagataaaccggttcaagctttgatgcgtattgcggatgaattaggagaaatctttaaattcgaggcgcctggtagcgtaacgcgctatttatcaagtcagcgtctaattaaagaagcatgcgatgaatcacgctttgataaaaacttaagtcaagggcttaaatttgcacgtgattttgttggagacgggctggttacaagctggacgcatgaaccgaattggaaaaaagcgcataatatcttagttccaagctttagtcagcgcgcaatgcgtcgttatcatgcgatgatggtcgatatcgccgtgcagcttgttcaaaagtgggggcgtctaaatgcagatgagcatattgaagtatcggaagacatgacacgtttaacgcttgatacaattggtctttgcctgtttaactatcgctttaacagcttttaccgagatacgcctcatccatttattgtgagtgtggttcgtgcactggatgaagtaatgaacaagctgcagcgagcaaatccagacgacccagcttatgatgaaaacaagcgccagtgtcaagaagatatcaaggtgatgaacgactatgtagataaaattattgcagatcgcaaaaacaggggtgaagtcagtcatgatttattaacccagatgctaaacggaaaagatccagaaacgggtgagccgcttgatgacgggaatattcgtcagcaaattattacattcttaattgcgggacaccaaacgacaagtggtcttttatcatttgcgctgtatttcttagtgaaaaatccacgtgtattacaaaaggtagcagaagaagcagcacgagttctagtagatcctgttccaagctacaaacaagtcaaacagcttaaatatgttggcatggtcttaaacgaagcgctgcgcttatggccagtagcgcctatgttttccctatatgcaaaagaagatacggtgcttggaggagaatatcctttaacgaaaggcgacgaagtaatggttctggtgcctcagcttcaccgtgataaaatcatttggggagacgatgtggaggagttccgtccagagcgttttgaaaatccaagtgcgattccgcagcatgcgtttaaaccgtttggaaacggtcagcgtgcgtgtatcggtcagcagttcgctcttcatagtgcaacgctggtacttggtatgatgctaaaacactttgactttgaagatcatacaaactacgagctcgtcattaaagaatcgcggacgttaaaacctgaaggcttttcggtaaaagcaaaatcgaaaggcattccgcttggcggtattccttcaccttcgactgaacagggtgctaaaaaagtacgcaaaaaggcagaaaacgctcataatacgccgctgcttgtgctatacggttcaaatgcgggaacagctgaaggaacggcgcgtgatttagcagatattgcaatgagcaaaggatttgcaccgcaggtcgcaacgcttgattcacacgccggtaatcttccgcgcgaaggagctgtattaattgtaacggcgtcttataacggtcatccgcctgataacgcaaagcaatttgtcgattggttagaccaagcgtctgcggatgaagtaaaaggcgttcgctactccgtatttggatgcggcgataaaaattgggcggggacgtatcaaaaagtgcctgcttttatcgatgaaacgcttgccgctaaaggggcagaaaacatcgctaagcgcggtgaagcagatgcaagcgacgactttgaaggcgcgtatgaagaatggcgtgatcatatgtggagtgacgtagcagcctactttggtctcgacattgaaaacagtgaagataataaatctactctttcacttcaatttgtcgacagcgcggcggatatgcctcttgcgaaaatgcacgatgcgttttcaacgaacgtcgtagcaagcaaagaacttcaacagcctggcagtgcacgaagcacgcgacatcttgaaattgaacttccaaaagaagcttcttatcaagaaggagatcatttaggtgttattcctcgctattatgaaggaatagtaaaccgtgtaacacagaggttcggcctaagcgcatcacagctgatccgtctggaagcagaagaagaaaaattagctcatttgccactcgctaaaacagtatccgtagaagagcttctgcaatacgtggagcttcaagatcctgttacgcgcacgcagcttcgcgcaatggctgctaaaacggtctgcccgccgcataaagtagagcttgaagccttgcttggcaagcaagcctataaagaacaggtgctggcaaaacgtttaacaatgcttgaactgcttgaaaaatacccggcgtgtgaaatgagtttcagcgaatttatcgcccttctgccaagcatacgcccgcgctattactcgatttcttcatcacctcgtgtcgatctgaaacaagcaagcatcacggtcagcgttgtcagcggactggcgtggagcggatatggagaatataaaggaattgcgtcgaactatcttgctgagctgcaagaaggagatacgattacgtgctttatttccacaccgcagtcagagtttacgctgccaaaagaccctgaaacgccgcttatcatggtcggaccgggaacaggcgtcgcgccgtttagaggctttgtgcaggcgcgcaaacagctaaaagaacaaggacagtcacttggagaagcacatttatacttcggctgccgttcacctcatgaagactatctgtatcaagaagagcttgaaaacgcccaaagcgaaggcatcattctgcttcataccgctttttctcgcatgccgaatcagccgaaaacatacgttcagcacgtaatggaacaagacggcaagaaattgattgaacttcttgatcaaggagcgcacttctatatttgcggagacggaattcaaatggcacctgccgttgaagcaacgcttatgaaaagctatgctgacgttcaccaagtgtcggaagcagacgctcgcttatggctgcagcagctagaagaaaaaggccgatacgcaaaagacgtgtggctgggg

SEQ ID NO: 1286 - protein, 1049 aa, synthetic construct
  REGION 1..1049: note = variant of P450 oxidase from Bacillus megaterium
MTIKEMPQPKTFGELKNLPLLNTDKPVQALMRIADELGEIFKFEAPGSVTRYLSSQRLIKEACDESRFDKNLSQGLKFARDFVGDGLVTSWTHEPNWKKAHNILVPSFSQRAMRRYHAMMVDIAVQLVQKWGRLNADEHIEVSEDMTRLTLDTIGLCLFNYRFNSFYRDTPHPFIVSVVRALDEVMNKLQRANPDDPAYDENKRQCQEDIKVMNDYVDKIIADRKNRGEVSHDLLTQMLNGKDPETGEPLDDGNIRQQIITFLIAGHQTTSGLLSFALYFLVKNPRVLQKVAEEAARVLVDPVPSYKQVKQLKYVGMVLNEALRLWPVAPMFSLYAKEDTVLGGEYPLTKGDEVMVLVPQLHRDKIIWGDDVEEFRPERFENPSAIPQHAFKPFGNGQRACIGQQFALHSATLVLGMMLKHFDFEDHTNYELVIKESRTLKPEGFSVKAKSKGIPLGGIPSPSTEQGAKKVRKKAENAHNTPLLVLYGSNAGTAEGTARDLADIAMSKGFAPQVATLDSHAGNLPREGAVLIVTASYNGHPPDNAKQFVDWLDQASADEVKGVRYSVFGCGDKNWAGTYQKVPAFIDETLAAKGAENIAKRGEADASDDFEGAYEEWRDHMWSDVAAYFGLDIENSEDNKSTLSLQFVDSAADMPLAKMHDAFSTNVVASKELQQPGSARSTRHLEIELPKEASYQEGDHLGVIPRYYEGIVNRVTQRFGLSASQLIRLEAEEEKLAHLPLAKTVSVEELLQYVELQDPVTRTQLRAMAAKTVCPPHKVELEALLGKQAYKEQVLAKRLTMLELLEKYPACEMSFSEFIALLPSIRPRYYSISSSPRVDLKQASITVSVVSGLAWSGYGEYKGIASNYLAELQEGDTITCFISTPQSEFTLPKDPETPLIMVGPGTGVAPFRGFVQARKQLKEQGQSLGEAHLYFGCRSPHEDYLYQEELENAQSEGIILLHTAFSRMPNQPKTYVQHVMEQDGKKLIELLDQGAHFYICGDGIQMAPAVEATLMKSYADVHQVSEADARLWLQQLEEKGRYAKDVWLG

SEQ ID NO: 1287 - DNA, 3147 bp, synthetic construct
  misc_feature 1..3147: note = variant of P450 oxidase from Bacillus megaterium
  source 1..3147: mol_type = other DNA
atgacaattaaggaaatgcctcagcctaagacgtttggagaacttaaaaatttaccgttattaaatacagataaaccggttcaagctttgatgcgtattgcggatgaattaggagaaatctttaaattcgaggcgcctggtagcgtaacgcgctatttatcaagtcagcgtctaattaaagaagcatgcgatgaatcacgctttgataaaaacttaagtcaagggcttaaatttgcacgtgattttgttggagacgggctggttacaagctggacgcatgaaccgaattggaaaaaagcgcataatatcttagttccaagctttagtcagcgcgcaatgcgtcgttatcatgcgatgatggtcgatatcgccgtgcagcttgttcaaaagtgggggcgtctaaatgcagatgagcatattgaagtatcggaagacatgacacgtttaacgcttgatacaattggtctttgcctgtttaactatcgctttaacagcttttaccgagatacgcctcatccatttattgtgagtgtggttcgtgcactggatgaagtaatgaacaagctgcagcgagcaaatccagacgacccagcttatgatgaaaacaagcgccagtgtcaagaagatatcaaggtgatgaacgactatgtagataaaattattgcagatcgcaaaaacaggggtgaacaaagtcatgatttattaacccagatgctaaacggaaaagatccagaaacgggtgagccgcttgatgacgggaatattcgtcagcaaattattacattcttaattgcgggacaccaaacgacaagtggtcttttatcatttgcgctgtatttcttagtgaaaaatccacgtgtattacaaaaggtatcgacggaagcgcagcgagttctagtagatcctgttccaagctacaaacaagtcaaacagcttaaatatgttggcatggtcttaaacgaagcgctgcgcttatggccagtagcgcctatgttttccctatatgcaaaagaagatacggtgcttggaggagaatatcctttaacgaaaggcgacgaagtaatggttctggtgcctcagcttcaccgtgataaaatcatttggggagacgatgtggaggagttccgtccagagcgttttgaaaatccaagtgcgattccgcagcatgcgtttaaaccgtttggaaacggtcagcgtgcgtgtatcggtcagcagttcgctcttcatagtgcaacgctggtacttggtatgatgctaaaacactttgactttgaagatcatacaaactacgagctcgtcattaaagaatcgcggacgttaaaacctgaaggctttgtggtaaaagcaaaatcgaaaggcattccgcttggcggtattccttcacctgttactgaacagggtgctaaaaaagtacgcaaaaaggcagaaaacgctcataatacgccgctgcttgtgctatacggttcaaatgcgggaacagctgaaggaacggcgcgtgatttagcagatattgcaatgagcaaaggatttgcaccgcaggtcgcaacgcttgattcacacgccggtaatcttccgcgcgaaggagctgtattaattgtaacggcgtcttataacggtcatccgcctgataacgcaaagcaatttgtcgattggttagaccaagcgtctgcggatgaagtaaaaggcgttcgctactccgtatttggatgcggcgataaaaattgggcggggacgtatcaaaaagtgcctgcttttatcgatgaaacgcttgccgctaaaggggcagaaaacatcgctaagcgcggtgaagcagatgcaagcgacgactttgaaggcgcgtatgaagaatggcgtgatcatatgtggagtgacgtagcagcctactttggtctcgacattgaaaacagtgaagataataaatctactctttcacttcaatttgtcgacagcgcggcggatatgcctcttgcgaaaatgcacgatgcgttttcaacgaacgtcgtagcaagcaaagaacttcaacagcctggcagtgcacgaagcacgcgacatcttgaaattgaacttccaaaagaagcttcttatcaagaaggagatcatttaggtgttattcctcgctattatgaaggaatagtaaaccgtgtaacacagaggttcggcctaagcgcatcacagctgatccgtctggaagcagaagaagaaaaattagctcatttgccactcgctaaaacagtatccgtagaagagcttctgcaatacgtggagcttcaagatcctgttacgcgcacgcagcttcgcgcaatggctgctaaaacggtctgcccgccgcataaagtagagcttgaagccttgcttggcaagcaagcctataaagaacaggtgctggcaaaacgtttaacaatgcttgaactgcttgaaaaatacccggcgtgtgaaatgagtttcagcgaatttatcgcccttctgccaagcatacgcccgcgctattactcgatttcttcatcacctcgtgtcgatctgaaacaagcaagcatcacggtcagcgttgtcagcggactggcgtggagcggatatggagaatataaaggaattgcgtcgaactatcttgctgagctgcaagaaggagatacgattacgtgctttatttccacaccgcagtcagagtttacgctgccaaaagaccctgaaacgccgcttatcatggtcggaccgggaacaggcgtcgcgccgtttagaggctttgtgcaggcgcgcaaacagctaaaagaacaaggacagtcacttggagaagcacatttatacttcggctgccgttcacctcatgaagactatctgtatcaagaagagcttgaaaacgcccaaagcgaaggcatcattctgcttcataccgctttttctcgcatgccgaatcagccgaaaacatacgttcagcacgtaatggaacaagacggcaagaaattgattgaacttcttgatcaaggagcgcacttctatatttgcggagacggaattcaaatggcacctgccgttgaagcaacgcttatgaaaagctatgctgacgttcaccaagtgtcggaagcagacgctcgcttatggctgcagcagctagaagaaaaaggccgatacgcaaaagacgtgtggctgggg

SEQ ID NO: 1288 - protein, 1049 aa, synthetic construct
  REGION 1..1049: note = variant of P450 oxidase from Bacillus megaterium
MTIKEMPQPKTFGELKNLPLLNTDKPVQALMRIADELGEIFKFEAPGSVTRYLSSQRLIKEACDESRFDKNLSQGLKFARDFVGDGLVTSWTHEPNWKKAHNILVPSFSQRAMRRYHAMMVDIAVQLVQKWGRLNADEHIEVSEDMTRLTLDTIGLCLFNYRFNSFYRDTPHPFIVSVVRALDEVMNKLQRANPDDPAYDENKRQCQEDIKVMNDYVDKIIADRKNRGEQSHDLLTQMLNGKDPETGEPLDDGNIRQQIITFLIAGHQTTSGLLSFALYFLVKNPRVLQKVSTEAQRVLVDPVPSYKQVKQLKYVGMVLNEALRLWPVAPMFSLYAKEDTVLGGEYPLTKGDEVMVLVPQLHRDKIIWGDDVEEFRPERFENPSAIPQHAFKPFGNGQRACIGQQFALHSATLVLGMMLKHFDFEDHTNYELVIKESRTLKPEGFVVKAKSKGIPLGGIPSPVTEQGAKKVRKKAENAHNTPLLVLYGSNAGTAEGTARDLADIAMSKGFAPQVATLDSHAGNLPREGAVLIVTASYNGHPPDNAKQFVDWLDQASADEVKGVRYSVFGCGDKNWAGTYQKVPAFIDETLAAKGAENIAKRGEADASDDFEGAYEEWRDHMWSDVAAYFGLDIENSEDNKSTLSLQFVDSAADMPLAKMHDAFSTNVVASKELQQPGSARSTRHLEIELPKEASYQEGDHLGVIPRYYEGIVNRVTQRFGLSASQLIRLEAEEEKLAHLPLAKTVSVEELLQYVELQDPVTRTQLRAMAAKTVCPPHKVELEALLGKQAYKEQVLAKRLTMLELLEKYPACEMSFSEFIALLPSIRPRYYSISSSPRVDLKQASITVSVVSGLAWSGYGEYKGIASNYLAELQEGDTITCFISTPQSEFTLPKDPETPLIMVGPGTGVAPFRGFVQARKQLKEQGQSLGEAHLYFGCRSPHEDYLYQEELENAQSEGIILLHTAFSRMPNQPKTYVQHVMEQDGKKLIELLDQGAHFYICGDGIQMAPAVEATLMKSYADVHQVSEADARLWLQQLEEKGRYAKDVWLG

SEQ ID NO: 1289 - DNA, 3147 bp, synthetic construct
  misc_feature 1..3147: note = variant of P450 oxidase from Bacillus megaterium
  source 1..3147: mol_type = other DNA
atgacaattaaggaaatgcctcagcctaagacgtttggagaacttaaaaatttaccgttattaaatacagataaaccggttcaagctttgatgcgtattgcggatgaattaggagaaatctttaaattcgaggcgcctggtagcgtaacgcgctatttatcaagtcagcgtctaattaaagaagcatgcgatgaatcacgctttgataaaaacttaagtcaagggcttaaatttgcacgtgattttgttggagacgggctggttacaagctggacgcatgaaccgaattggaaaaaagcgcataatatcttagttccaagctttagtcagcgcgcaatgggtcgttatcatgcgatgatggtcgatatcgccgtgcagcttgttcaaaagtgggggcgtctaaatgcagatgagcatattgaagtatcggaagacatgacacgtttaacgcttgatacaattggtctttgcctgtttaactatcgctttaacagcttttaccgagatacgcctcatccatttattgtgagtgtggttcgtgcactggatgaagtaatgaacaagctgcagcgagcaaatccagacgacccagcttatgatgaaaacaagcgccagtgtcaagaagatatcaaggtgatgaacgactatgtagataaaattattgcagatcgcaaaaacaggggtgaacaaagtcatgatttattaacccagatgctaaacggaaaagatccagaaacgggtgagccgcttgatgacgggaatattcgtcagcaaattattacattcttaattgcgggacaccaaacgacaagtggtcttttatcatttgcgctgtatttcttagtgaaaaatccacgtgtattacaaaaggtagcagaagaagcagcacgagttctagtagatcctgttccaagctacaaacaagtcaaacagcttaaatatgttggcatggtcttaaacgaagcgctgcgcttatggccagtagcgcctatgttttccctatatgcaaaagaagatacggtgcttggaggagaatatcctttaacgaaaggcgacgaagtaatggttctggtgcctcagcttcaccgtgataaaatcatttggggagacgatgtggaggagttccgtccagagcgttttgaaaatccaagtgcgattccgcagcatgcgtttaaaccgtttggaaacggtcagcgtgcgtgtatcggtcagcagttcgctcttcatagtgcaacgctggtacttggtatgatgctaaaacactttgactttgaagatcatacaaactacgagctcgtcattaaagaatcgcggacgttaaaacctgaaggctttgtggtaaaagcaaaatcgaaaggcattccgcttggcggtattccttcaccttcgactgaacagggtgctaaaaaagtacgcaaaaaggcagaaaacgctcataatacgccgctgcttgtgctatacggttcaaatgcgggaacagctgaaggaacggcgcgtgatttagcagatattgcaatgagcaaaggatttgcaccgcaggtcgcaacgcttgattcacacgccggtaatcttccgcgcgaaggagctgtattaattgtaacggcgtcttataacggtcatccgcctgataacgcaaagcaatttgtcgattggttagaccaagcgtctgcggatgaagtaaaaggcgttcgctactccgtatttggatgcggcgataaaaattgggcggggacgtatcaaaaagtgcctgcttttatcgatgaaacgcttgccgctaaaggggcagaaaacatcgctaagcgcggtgaagcagatgcaagcgacgactttgaaggcgcgtatgaagaatggcgtgatcatatgtggagtgacgtagcagcctactttggtctcgacattgaaaacagtgaagataataaatctactctttcacttcaatttgtcgacagcgcggcggatatgcctcttgcgaaaatgcacgatgcgttttcaacgaacgtcgtagcaagcaaagaacttcaacagcctggcagtgcacgaagcacgcgacatcttgaaattgaacttccaaaagaagcttcttatcaagaaggagatcatttaggtgttattcctcgctattatgaaggaatagtaaaccgtgtaacacagaggttcggcctaagcgcatcacagctgatccgtctggaagcagaagaagaaaaattagctcatttgccactcgctaaaacagtatccgtagaagagcttctgcaatacgtggagcttcaagatcctgttacgcgcacgcagcttcgcgcaatggctgctaaaacggtctgcccgccgcataaagtagagcttgaagccttgcttggcaagcaagcctataaagaacaggtgctggcaaaacgtttaacaatgcttgaactgcttgaaaaatacccggcgtgtgaaatgagtttcagcgaatttatcgcccttctgccaagcatacgcccgcgctattactcgatttcttcatcacctcgtgtcgatctgaaacaagcaagcatcacggtcagcgttgtcagcggactggcgtggagcggatatggagaatataaaggaattgcgtcgaactatcttgctgagctgcaagaaggagatacgattacgtgctttatttccacaccgcagtcagagtttacgctgccaaaagaccctgaaacgccgcttatcatggtcggaccgggaacaggcgtcgcgccgtttagaggctttgtgcaggcgcgcaaacagctaaaagaacaaggacagtcacttggagaagcacatttatacttcggctgccgttcacctcatgaagactatctgtatcaagaagagcttgaaaacgcccaaagcgaaggcatcattctgcttcataccgctttttctcgcatgccgaatcagccgaaaacatacgttcagcacgtaatggaacaagacggcaagaaattgattgaacttcttgatcaaggagcgcacttctatatttgcggagacggaattcaaatggcacctgccgttgaagcaacgcttatgaaaagctatgctgacgttcaccaagtgtcggaagcagacgctcgcttatggctgcagcagctagaagaaaaaggccgatacgcaaaagacgtgtggctgggg

SEQ ID NO: 1290 - protein, 1049 aa, synthetic construct
  REGION 1..1049: note = variant of P450 oxidase from Bacillus megaterium
MTIKEMPQPKTFGELKNLPLLNTDKPVQALMRIADELGEIFKFEAPGSVTRYLSSQRLIKEACDESRFDKNLSQGLKFARDFVGDGLVTSWTHEPNWKKAHNILVPSFSQRAMGRYHAMMVDIAVQLVQKWGRLNADEHIEVSEDMTRLTLDTIGLCLFNYRFNSFYRDTPHPFIVSVVRALDEVMNKLQRANPDDPAYDENKRQCQEDIKVMNDYVDKIIADRKNRGEQSHDLLTQMLNGKDPETGEPLDDGNIRQQIITFLIAGHQTTSGLLSFALYFLVKNPRVLQKVAEEAARVLVDPVPSYKQVKQLKYVGMVLNEALRLWPVAPMFSLYAKEDTVLGGEYPLTKGDEVMVLVPQLHRDKIIWGDDVEEFRPERFENPSAIPQHAFKPFGNGQRACIGQQFALHSATLVLGMMLKHFDFEDHTNYELVIKESRTLKPEGFVVKAKSKGIPLGGIPSPSTEQGAKKVRKKAENAHNTPLLVLYGSNAGTAEGTARDLADIAMSKGFAPQVATLDSHAGNLPREGAVLIVTASYNGHPPDNAKQFVDWLDQASADEVKGVRYSVFGCGDKNWAGTYQKVPAFIDETLAAKGAENIAKRGEADASDDFEGAYEEWRDHMWSDVAAYFGLDIENSEDNKSTLSLQFVDSAADMPLAKMHDAFSTNVVASKELQQPGSARSTRHLEIELPKEASYQEGDHLGVIPRYYEGIVNRVTQRFGLSASQLIRLEAEEEKLAHLPLAKTVSVEELLQYVELQDPVTRTQLRAMAAKTVCPPHKVELEALLGKQAYKEQVLAKRLTMLELLEKYPACEMSFSEFIALLPSIRPRYYSISSSPRVDLKQASITVSVVSGLAWSGYGEYKGIASNYLAELQEGDTITCFISTPQSEFTLPKDPETPLIMVGPGTGVAPFRGFVQARKQLKEQGQSLGEAHLYFGCRSPHEDYLYQEELENAQSEGIILLHTAFSRMPNQPKTYVQHVMEQDGKKLIELLDQGAHFYICGDGIQMAPAVEATLMKSYADVHQVSEADARLWLQQLEEKGRYAKDVWLG

SEQ ID NO: 1291 - DNA, 3147 bp, synthetic construct
  misc_feature 1..3147: note = variant of P450 oxidase from Bacillus megaterium
  source 1..3147: mol_type = other DNA
atgacaattaaggaaatgcctcagcctaagacgtttggagaacttaaaaatttaccgttattaaatacagataaaccggttcaagctttgatgcgtattgcggatgaattaggagaaatctttaaattcgaggcgcctggtagcgtaacgcgctatttatcaagtcagcgtctaattaaagaagcatgcgatgaatcacgctttgataaaaacttaagtcaagggcttaaatttgcacgtgattttgttggagacgggctggttacaagctggacgcatgaaccgaattggaaaaaagcgcataatatcttagttccaagctttagtcagcgcgcaatggggcgttatcatgcgatgatggtcgatatcgccgtgcagcttgttcaaaagtgggggcgtctaaatgcagatgagcatattgaagtatcggaagacatgacacgtttaacgcttgatacaattggtctttgcctgtttaactatcgctttaacagcttttaccgagatacgcctcatccatttattgtgagtgtggttcgtgcactggatgaagtaatgaacaagctgcagcgagcaaatccagacgacccagcttatgatgaaaacaagcgccagtgtcaagaagatatcaaggtgatgaacgactatgtagataaaattattgcagatcgcaaaaacaggggtgaacaaagtcatgatttattaacccagatgctaaacggaaaagatccagaaacgggtgagccgcttgatgacgggaatattcgtcagcaaattattacattcttaattgcgggacaccaaacgacaagtggtcttttatcatttgcgctgtatttcttagtgaaaaatccacgtgtattacaaaaggtagcagaagaagcagcacgagttctagtagatcctgttccaagctacaaacaagtcaaacagcttaaatatgttggcatggtcttaaacgaagcgctgcgcttatggccagtagcgcctatgttttccctatatgcaaaagaagatacggtgcttggaggagaatatcctttaacgaaaggcgacgaagtaatggttctggtgcctcagcttcaccgtgataaaatcatttggggagacgatgtggaggagttccgtccagagcgttttgaaaatccaagtgcgattccgcagcatgcgtttaaaccgtttggaaacggtcagcgtgcgtgtatcggtcagcagttcgctcttcatagtgcaacgctggtacttggtatgatgctaaaacactttgactttgaagatcatacaaactacgagctcgtcattaaagaatcgcggacgttaaaacctgaaggctttgtggtaaaagcaaaatcgaaaggcattccgcttggcggtattccttcaccttcgactgaacagggtgctaaaaaagtacgcaaaaaggcagaaaacgctcataatacgccgctgcttgtgctatacggttcaaatgcgggaacagctgaaggaacggcgcgtgatttagcagatattgcaatgagcaaaggatttgcaccgcaggtcgcaacgcttgattcacacgccggtaatcttccgcgcgaaggagctgtattaattgtaacggcgtcttataacggtcatccgcctgataacgcaaagcaatttgtcgattggttagaccaagcgtctgcggatgaagtaaaaggcgttcgctactccgtatttggatgcggcgataaaaattgggcggggacgtatcaaaaagtgcctgcttttatcgatgaaacgcttgccgctaaaggggcagaaaacatcgctaagcgcggtgaagcagatgcaagcgacgactttgaaggcgcgtatgaagaatggcgtgatcatatgtggagtgacgtagcagcctactttggtctcgacattgaaaacagtgaagataataaatctactctttcacttcaatttgtcgacagcgcggcggatatgcctcttgcgaaaatgcacgatgcgttttcaacgaacgtcgtagcaagcaaagaacttcaacagcctggcagtgcacgaagcacgcgacatcttgaaattgaacttccaaaagaagcttcttatcaagaaggagatcatttaggtgttattcctcgctattatgaaggaatagtaaaccgtgtaacacagaggttcggcctaagcgcatcacagctgatccgtctggaagcagaagaagaaaaattagctcatttgccactcgctaaaacagtatccgtagaagagcttctgcaatacgtggagcttcaagatcctgttacgcgcacgcagcttcgcgcaatggctgctaaaacggtctgcccgccgcataaagtagagcttgaagccttgcttggcaagcaagcctataaagaacaggtgctggcaaaacgtttaacaatgcttgaactgcttgaaaaatacccggcgtgtgaaatgagtttcagcgaatttatcgcccttctgccaagcatacgcccgcgctattactcgatttcttcatcacctcgtgtcgatctgaaacaagcaagcatcacggtcagcgttgtcagcggaccggcgtggagcggatatggagaatataaaggaattgcgtcgaactatcttgctgagctgcaagaaggagatacgattacgtgctttatttccacaccgcagtcagagtttacgctgccaaaagaccctgaaacgccgcttatcatggtcggaccgggaacaggcgtcgcgccgtttagaggctttgtgcaggcgcgcaaacagctaaaagaacaaggacagtcacttggagaagcacatttatacttcggctgccgttcacctcatgaagactatctgtatcaagaagagcttgaaaacgcccaaagcgaaggcatcattctgcttcataccgctttttctcgcatgccgaatcagccgaaaacatacgttcagcacgtaatggaacaagacggcaagaaattgattgaacttcttgatcaaggagcgcacttctatatttgcggagacggaattcaaatggcacctgccgttgaagcaacgcttatgaaaggttatgctgacgttcaccaagtgtcggaagcagacgctcgcttatggctgcagcagctagaagaaaaaggccgatacgcaaaagacgtgtggctgggg

SEQ ID NO: 1292 - protein, 1049 aa, synthetic construct
  REGION 1..1049: note = variant of P450 oxidase from Bacillus megaterium
MTIKEMPQPKTFGELKNLPLLNTDKPVQALMRIADELGEIFKFEAPGSVTRYLSSQRLIKEACDESRFDKNLSQGLKFARDFVGDGLVTSWTHEPNWKKAHNILVPSFSQRAMGRYHAMMVDIAVQLVQKWGRLNADEHIEVSEDMTRLTLDTIGLCLFNYRFNSFYRDTPHPFIVSVVRALDEVMNKLQRANPDDPAYDENKRQCQEDIKVMNDYVDKIIADRKNRGEQSHDLLTQMLNGKDPETGEPLDDGNIRQQIITFLIAGHQTTSGLLSFALYFLVKNPRVLQKVAEEAARVLVDPVPSYKQVKQLKYVGMVLNEALRLWPVAPMFSLYAKEDTVLGGEYPLTKGDEVMVLVPQLHRDKIIWGDDVEEFRPERFENPSAIPQHAFKPFGNGQRACIGQQFALHSATLVLGMMLKHFDFEDHTNYELVIKESRTLKPEGFVVKAKSKGIPLGGIPSPSTEQGAKKVRKKAENAHNTPLLVLYGSNAGTAEGTARDLADIAMSKGFAPQVATLDSHAGNLPREGAVLIVTASYNGHPPDNAKQFVDWLDQASADEVKGVRYSVFGCGDKNWAGTYQKVPAFIDETLAAKGAENIAKRGEADASDDFEGAYEEWRDHMWSDVAAYFGLDIENSEDNKSTLSLQFVDSAADMPLAKMHDAFSTNVVASKELQQPGSARSTRHLEIELPKEASYQEGDHLGVIPRYYEGIVNRVTQRFGLSASQLIRLEAEEEKLAHLPLAKTVSVEELLQYVELQDPVTRTQLRAMAAKTVCPPHKVELEALLGKQAYKEQVLAKRLTMLELLEKYPACEMSFSEFIALLPSIRPRYYSISSSPRVDLKQASITVSVVSGPAWSGYGEYKGIASNYLAELQEGDTITCFISTPQSEFTLPKDPETPLIMVGPGTGVAPFRGFVQARKQLKEQGQSLGEAHLYFGCRSPHEDYLYQEELENAQSEGIILLHTAFSRMPNQPKTYVQHVMEQDGKKLIELLDQGAHFYICGDGIQMAPAVEATLMKGYADVHQVSEADARLWLQQLEEKGRYAKDVWLG

SEQ ID NO: 1293 - DNA, 3147 bp, synthetic construct
  misc_feature 1..3147: note = variant of P450 oxidase from Bacillus megaterium
  source 1..3147: mol_type = other DNA
atgacaattaaggaaatgcctcagcctaagacgtttggagaacttaaaaatttaccgttattaaatacagataaaccggttcaagctttgatgcgtattgcggatgaattaggagaaatctttaaattcgaggcgcctggtagcgtaacgcgctatttatcaagtcagcgtctaattaaagaagcatgcgatgaatcacgctttgataaaaacttaagtcaagggcttaaatttgcacgtgattttgttggagacgggctggttacaagctggacgcatgaaccgaattggaaaaaagcgcataatatcttagttccaagctttagtcagcgcgcaatggggcgttatcatgcgatgatggtcgatatcgccgtgcagcttgttcaaaagtgggggcgtctaaatgcagatgagcatattgaagtatcggaagacatgacacgtttaacgcttgatacaattggtctttgcctgtttaactatcgctttaacagcttttaccgagatacgcctcatccatttattgtgagtgtggttcgtgcactggatgaagtaatgaacaagctgcagcgagcaaatccagacgacccagcttatgatgaaaacaagcgccagtgtcaagaagatatcaaggtgatgaacgactatgtagataaaattattgcagatcgcaaaaacaggggtgaacaaagtcatgatttattaacccagatgctaaacggaaaagatccagaaacgggtgagccgcttgatgacgggaatattcgtcagcaaattattacattcttaattgcgggacaccaaacgacaagtggtcttttatcatttgcgctgtatttcttagtgaaaaatccacgtgtattacaaaaggtagcagaagaagcagcacgagttctagtagatcctgttccaagctacaaacaagtcaaacagcttaaatatgttggcatggtcttaaacgaagcgctgcgcttatggccagtagcgcctatgttttccctatatgcaaaagaagatacggtgcttggaggagaatatcctttaacgaaaggcgacgaagtaatggttctggtgcctcagcttcaccgtgataaaatcatttggggagacgatgtggaggagttccgtccagagcgttttgaaaatccaagtgcgattccgcagcatgcgtttaaaccgtttggaaacggtcagcgtgcgtgtatcggtcagcagttcgctcttcatagtgcaacgctggtacttggtatgatgctaaaacactttgactttgaagatcatacaaactacgagctcgtcattaaagaatcgcggacgttaaaacctgaaggctttgtggtaaaagcaaaatcgaaaggcattccgcttggcggtattccttcaccttcgactgaacagggtgctaaaaaagtacgcaaaaaggcagaaaacgctcataatacgccgctgcttgtgctatacggttcaaatgcgggaacagctgaaggaacggcgcgtgatttagcagatattgcaatgagcaaaggatttgcaccgcaggtcgcaacgcttgattcacacgccggtaatcttccgcgcgaaggagctgtattaattgtaacggcgtcttataacggtcatccgcctgataacgcaaagcaatttgtcgattggttagaccaagcgtctgcggatgaagtaaaaggcgttcgctactccgtatttggatgcggcgataaaaattgggcggggacgtatcaaaaagtgcctgcttttatcgatgaaacgcttgccgctaaaggggcagaaaacatcgctaagcgcggtgaagcagatgcaagcgacgactttgaaggcgcgtatgaagaatggcgtgatcatatgtggagtgacgtagcagcctactttggtctcgacattgaaaacagtgaagataataaatctactctttcacttcaatttgtcgacagcgcggcggatatgcctcttgcgaaaatgcacgatgcgttttcaacgaacgtcgtagcaagcaaagaacttcaacagcctggcagtgcacgaagcacgcgacatcttgaaattgaacttccaaaagaagcttcttatcaagaaggagatcatttaggtgttattcctcgctattatgaaggaatagtaaaccgtgtaacacagaggttcggcctaagcgcatcacagctgatccgtctggaagcagaagaagaaaaattagctcatttgccactcgctaaaacagtatccgtagaagagcttctgcaatacgtggagcttcaagatcctgttacgcgcacgcagcttcgcgcaatggctgctaaaacggtctgcccgccgcataaagtagagcttgaagccttgcttggcaagcaagcctataaagaacaggtgctggcaaaacgtttaacaatgcttgaactgcttgaaaaatacccggcgtgtgaaatgagtttcagcgaatttatcgcccttctgccaagcatacgcccgcgctattactcgatttcttcatcacctcgtgtcgatctgaaacaagcaagcatcacggtcagcgttgtcagcggaccggcgtggagcggatatggagaatataaaggaattgcgtcgaactatcttgctgagctgcaagaaggagatacgattacgtgctttatttccacaccgcagtcagagtttacgctgccaaaagaccctgaaacgccgcttatcatggtcggaccgggaacaggcgtcgcgccgtttagaggctttgtgcaggcgcgcaaacagctaaaagaacaaggacagtcacttggagaagcacatttatacttcggctgccgttcacctcatgaagactatctgtatcaagaagagcttgaaaacgcccaaagcgaaggcatcattctgcttcataccgctttttctcgcatgccgaatcagccgaaaacatacgttcagcacgtaatggaacaagacggcaagaaattgattgaacttcttgatcaaggagcgcacttctatatttgcggagacggaattcaaatggcacctgccgttgaagcaacgcttatgaaaagctatgctgacgtttggcaagtgtcggaagcagacgctcgcttatggctgcagcagctagaagaaaaaggccgatacgcaaaagacgtgtggctgggg

SEQ ID NO: 1294 - protein, 1049 aa, synthetic construct
  REGION 1..1049: note = variant of P450 oxidase from Bacillus megaterium
MTIKEMPQPKTFGELKNLPLLNTDKPVQALMRIADELGEIFKFEAPGSVTRYLSSQRLIKEACDESRFDKNLSQGLKFARDFVGDGLVTSWTHEPNWKKAHNILVPSFSQRAMGRYHAMMVDIAVQLVQKWGRLNADEHIEVSEDMTRLTLDTIGLCLFNYRFNSFYRDTPHPFIVSVVRALDEVMNKLQRANPDDPAYDENKRQCQEDIKVMNDYVDKIIADRKNRGEQSHDLLTQMLNGKDPETGEPLDDGNIRQQIITFLIAGHQTTSGLLSFALYFLVKNPRVLQKVAEEAARVLVDPVPSYKQVKQLKYVGMVLNEALRLWPVAPMFSLYAKEDTVLGGEYPLTKGDEVMVLVPQLHRDKIIWGDDVEEFRPERFENPSAIPQHAFKPFGNGQRACIGQQFALHSATLVLGMMLKHFDFEDHTNYELVIKESRTLKPEGFVVKAKSKGIPLGGIPSPSTEQGAKKVRKKAENAHNTPLLVLYGSNAGTAEGTARDLADIAMSKGFAPQVATLDSHAGNLPREGAVLIVTASYNGHPPDNAKQFVDWLDQASADEVKGVRYSVFGCGDKNWAGTYQKVPAFIDETLAAKGAENIAKRGEADASDDFEGAYEEWRDHMWSDVAAYFGLDIENSEDNKSTLSLQFVDSAADMPLAKMHDAFSTNVVASKELQQPGSARSTRHLEIELPKEASYQEGDHLGVIPRYYEGIVNRVTQRFGLSASQLIRLEAEEEKLAHLPLAKTVSVEELLQYVELQDPVTRTQLRAMAAKTVCPPHKVELEALLGKQAYKEQVLAKRLTMLELLEKYPACEMSFSEFIALLPSIRPRYYSISSSPRVDLKQASITVSVVSGPAWSGYGEYKGIASNYLAELQEGDTITCFISTPQSEFTLPKDPETPLIMVGPGTGVAPFRGFVQARKQLKEQGQSLGEAHLYFGCRSPHEDYLYQEELENAQSEGIILLHTAFSRMPNQPKTYVQHVMEQDGKKLIELLDQGAHFYICGDGIQMAPAVEATLMKSYADVWQVSEADARLWLQQLEEKGRYAKDVWLG

SEQ ID NO: 1295 - DNA, 3147 bp, synthetic construct
  misc_feature 1..3147: note = variant of P450 oxidase from Bacillus megaterium
  source 1..3147: mol_type = other DNA
atgacaattaaggaaatgcctcagcctaagacgtttggagaacttaaaaatttaccgttattaaatacagataaaccggttcaagctttgatgcgtattgcggatgaattaggagaaatctttaaattcgaggcgcctggtagcgtaacgcgctatttatcaagtcagcgtctaattaaagaagcatgcgatgaatcacgctttgataaaaacttaagtcaagggcttaaatttgcacgtgattttgttggagacgggctggttacaagctggacgcatgaaccgaattggaaaaaagcgcataatatcttagttccaagctttagtcagcgcgcaatggggcgttatcatgcgatgatggtcgatatcgccgtgcagcttgttcaaaagtgggggcgtctaaatgcagatgagcatattgaagtatcggaagacatgacacgtttaacgcttgatacaattggtctttgcctgtttaactatcgctttaacagcttttaccgagatacgcctcatccatttattgtgagtgtggttcgtgcactggatgaagtaatgaacaagctgcagcgagcaaatccagacgacccagcttatgatgaaaacaagcgccagtgtcaagaagatatcaaggtgatgaacgactatgtagataaaattattgcagatcgcaaaaacaggggtgaacaaagtcatgatttattaacccagatgctaaacggaaaagatccagaaacgggtgagccgcttgatgacgggaatattcgtcagcaaattattacattcttaattgcgggacaccaaacgacaagtggtcttttatcatttgcgctgtatttcttagtgaaaaatccacgtgtattacaaaaggtagcagaagaagcagcacgagttctagtagatcctgttccaagctacaaacaagtcaaacagcttaaatatgttggcatggtcttaaacgaagcgctgcgcttatggccagtagcgcctatgttttccctatatgcaaaagaagatacggtgcttggaggagaatatcctttaacgaaaggcgacgaagtaatggttctggtgcctcagcttcaccgtgataaaatcatttggggagacgatgtggaggagttccgtccagagcgttttgaaaatccaagtgcgattccgcagcatgcgtttaaaccgtttggaaacggtcagcgtgcgtgtatcggtcagcagttcgctcttcatagtgcaacgctggtacttggtatgatgctaaaacactttgactttgaagatcatacaaactacgagctcgtcattaaagaatcgcggacgttaaaacctgaaggctttgtggtaaaagcaaaatcgaaaggcattccgcttggcggtattccttcaccttcgactgaacagggtgctaaaaaagtacgcaaaaaggcagaaaacgctcataatacgccgctgcttgtgctatacggttcaaatgcgggaacagctgaaggaacggcgcgtgatttagcagatattgcaatgagcaaaggatttgcaccgcaggtcgcaacgcttgattcacacgccggtaatcttccgcgcgaaggagctgtattaattgtaacggcgtcttataacggtcatccgcctgataacgcaaagcaatttgtcgattggttagaccaagcgtctgcggatgaagtaaaaggcgttcgctactccgtatttggatgcggcgataaaaattgggcggggacgtatcaaaaagtgcctgcttttatcgatgaaacgcttgccgctaaaggggcagaaaacatcgctaagcgcggtgaagcagatgcaagcgacgactttgaaggcgcgtatgaagaatggcgtgatcatatgtggagtgacgtagcagcctactttggtctcgacattgaaaacagtgaagataataaatctactctttcacttcaatttgtcgacagcgcggcggatatgcctcttgcgaaaatgcacgatgcgttttcaacgaacgtcgtagcaagcaaagaacttcaacagcctggcagtgcacgaagcacgcgacatcttgaaattgaacttccaaaagaagcttcttatcaagaaggagatcatttaggtgttattcctcgctattatgaaggaatagtaaaccgtgtaacacagaggttcggcctaagcgcatcacagctgatccgtctggaagcagaagaagaaaaattagctcatttgccactcgctaaaacagtatccgtagaagagcttctgcaatacgtggagcttcaagatcctgttacgcgcacgcagcttcgcgcaatggctgctaaaacggtctgcccgccgcataaagtagagcttgaagccttgcttggcaagcaagcctataaagaacaggtgctggcaaaacgtttaacaatgcttgaactgcttgaaaaatacccggcgtgtgaaatgagtttcagcgaatttatcgcccttctgccaagcatacgcccgcgctattactcgatttcttcatcacctcgtgtcgatctgaaacaagcaagcatcacggtcagcgttgtcagcggaccggcgtggagcggatatggagaatataaaggaattgcgtcgaactatcttgctgagctgcaagaaggagatacgattacgtgctttatttccacaccgcagtcagagtttacgctgccaaaagaccctgaaacgccgcttatcatggtcggaccgggaacaggcgtcgcgccgtttagaggctttgtgcaggcgcgcaaacagctaaaagaacaaggacagtcacttggagaagcacatttatacttcggctgccgttcacctcatgaagactatctgtatcaagaagagcttgaaaacgcccaaagcgaaggcatcattctgcttcataccgctttttctcgcatgccgaatcagccgaaaacatacgttcagcacgtaatggaacaagacggcaagaaattgattgaacttcttgatcaaggagcgcacttctatatttgcggagacggaattcaaatggcacctgccgttgaagcaacgcttatgaaattgtatgctgacgttcaccaagtgtcggaagcagacgctcgcttatggctgcagcagctagaagaaaaaggccgatacgcaaaagacgtgtggctgggg

SEQ ID NO: 1296 - protein, 1049 aa, synthetic construct
  REGION 1..1049: note = variant of P450 oxidase from Bacillus megaterium
MTIKEMPQPKTFGELKNLPLLNTDKPVQALMRIADELGEIFKFEAPGSVTRYLSSQRLIKEACDESRFDKNLSQGLKFARDFVGDGLVTSWTHEPNWKKAHNILVPSFSQRAMGRYHAMMVDIAVQLVQKWGRLNADEHIEVSEDMTRLTLDTIGLCLFNYRFNSFYRDTPHPFIVSVVRALDEVMNKLQRANPDDPAYDENKRQCQEDIKVMNDYVDKIIADRKNRGEQSHDLLTQMLNGKDPETGEPLDDGNIRQQIITFLIAGHQTTSGLLSFALYFLVKNPRVLQKVAEEAARVLVDPVPSYKQVKQLKYVGMVLNEALRLWPVAPMFSLYAKEDTVLGGEYPLTKGDEVMVLVPQLHRDKIIWGDDVEEFRPERFENPSAIPQHAFKPFGNGQRACIGQQFALHSATLVLGMMLKHFDFEDHTNYELVIKESRTLKPEGFVVKAKSKGIPLGGIPSPSTEQGAKKVRKKAENAHNTPLLVLYGSNAGTAEGTARDLADIAMSKGFAPQVATLDSHAGNLPREGAVLIVTASYNGHPPDNAKQFVDWLDQASADEVKGVRYSVFGCGDKNWAGTYQKVPAFIDETLAAKGAENIAKRGEADASDDFEGAYEEWRDHMWSDVAAYFGLDIENSEDNKSTLSLQFVDSAADMPLAKMHDAFSTNVVASKELQQPGSARSTRHLEIELPKEASYQEGDHLGVIPRYYEGIVNRVTQRFGLSASQLIRLEAEEEKLAHLPLAKTVSVEELLQYVELQDPVTRTQLRAMAAKTVCPPHKVELEALLGKQAYKEQVLAKRLTMLELLEKYPACEMSFSEFIALLPSIRPRYYSISSSPRVDLKQASITVSVVSGPAWSGYGEYKGIASNYLAELQEGDTITCFISTPQSEFTLPKDPETPLIMVGPGTGVAPFRGFVQARKQLKEQGQSLGEAHLYFGCRSPHEDYLYQEELENAQSEGIILLHTAFSRMPNQPKTYVQHVMEQDGKKLIELLDQGAHFYICGDGIQMAPAVEATLMKLYADVHQVSEADARLWLQQLEEKGRYAKDVWLG

SEQ ID NO: 1297 - DNA, 3147 bp, synthetic construct
  misc_feature 1..3147: note = variant of P450 oxidase from Bacillus megaterium
  source 1..3147: mol_type = other DNA
atgacaattaaggaaatgcctcagcctaagacgtttggagaacttaaaaatttaccgttattaaatacagataaaccggttcaagctttgatgcgtattgcggatgaattaggagaaatctttaaattcgaggcgcctggtagcgtaacgcgctatttatcaagtcagcgtctaattaaagaagcatgcgatgaatcacgctttgataaaaacttaagtcaagggcttaaatttgcacgtgattttgttggagacgggctggttacaagctggacgcatgaaccgaattggaaaaaagcgcataatatcttagttccaagctttagtcagcgcgcaatggggcgttatcatgcgatgatggtcgatatcgccgtgcagcttgttcaaaagtgggggcgtctaaatgcagatgagcatattgaagtatcggaagacatgacacgtttaacgcttgatacaattggtctttgcctgtttaactatcgctttaacagcttttaccgagatacgcctcatccatttattgtgagtgtggttcgtgcactggatgaagtaatgaacaagctgcagcgagcaaatccagacgacccagcttatgatgaaaacaagcgccagtgtcaagaagatatcaaggtgatgaacgactatgtagataaaattattgcagatcgcaaaaacaggggtgaacaaagtcatgatttattaacccagatgctaaacggaaaagatccagaaacgggtgagccgcttgatgacgggaatattcgtcagcaaattattacattcttaattgcgggacaccaaacgacaagtggtcttttatcatttgcgctgtatttcttagtgaaaaatccacgtgtattacaaaaggtagcagaagaagcagcacgagttctagtagatcctgttccaagctacaaacaagtcaaacagcttaaatatgttggcatggtcttaaacgaagcgctgcgcttatggccagtagcgcctatgttttccctatatgcaaaagaagatacggtgcttggaggagaatatcctttaacgaaaggcgacgaagtaatggttctggtgcctcagcttcaccgtgataaaatcatttggggagacgatgtggaggagttccgtccagagcgttttgaaaatccaagtgcgattccgcagcatgcgtttaaaccgtttggaaacggtcagcgtgcgtgtatcggtcagcagttcgctcttcatagtgcaacgctggtacttggtatgatgctaaaacactttgactttgaagatcatacaaactacgagctcgtcattaaagaatcgcggacgttaaaacctgaaggctttgtggtaaaagcaaaatcgaaaggcattccgcttggcggtattccttcaccttcgactgaacagggtgctaaaaaagtacgcaaaaaggcagaaaacgctcataatacgccgctgcttgtgctatacggttcaaatgcgggaacagctgaaggaacggcgcgtgatttagcagatattgcaatgagcaaaggatttgcaccgcaggtcgcaacgcttgattcacacgccggtaatcttccgcgcgaaggagctgtattaattgtaacggcgtcttataacggtcatccgcctgataacgcaaagcaatttgtcgattggttagaccaagcgtctgcggatgaagtaaaaggcgttcgctactccgtatttggatgcggcgataaaaattgggcggggacgtatcaaaaagtgcctgcttttatcgatgaaacgcttgccgctaaaggggcagaaaacatcgctaagcgcggtgaagcagatgcaagcgacgactttgaaggcgcgtatgaagaatggcgtgatcatatgtggagtgacgtagcagcctactttggtctcgacattgaaaacagtgaagataataaatctactctttcacttcaatttgtcgacagcgcggcggatatgcctcttgcgaaaatgcacgatgcgttttcaacgaacgtcgtagcaagcaaagaacttcaacagcctggcagtgcacgaagcacgcgacatcttgaaattgaacttccaaaagaagcttcttatcaagaaggagatcatttaggtgttattcctcgctattatgaaggaatagtaaaccgtgtaacacagaggttcggcctaagcgcatcacagctgatccgtctggaagcagaagaagaaaaattagctcatttgccactcgctaaaacagtatccgtagaagagcttctgcaatacgtggagcttcaagatcctgttacgcgcacgcagcttcgcgcaatggctgctaaaacggtctgcccgccgcataaagtagagcttgaagccttgcttggcaagcaagcctataaagtgcaggtgctggcaaaacgtttaacaatgcttgaactgcttgaaaaatacccggcgtgtgaaatgagtttcagcgaatttatcgcccttctgccaagcatacgcccgcgctattactcgatttcttcatcacctcgtgtcgatctgaaacaagcaagcatcacggtcagcgttgtcagcggaccggcgtggagcggatatggagaatataaaggaattgcgtcgaactatcttgctgagctgcaagaaggagatacgattacgtgctttatttccacaccgcagtcagagtttacgctgccaaaagaccctgaaacgccgcttatcatggtcggaccgggaacaggcgtcgcgccgtttagaggctttgtgcaggcgcgcaaacagctaaaagaacaaggacagtcacttggagaagcacatttatacttcggctgccgttcacctcatgaagactatctgtatcaagaagagcttgaaaacgcccaaagcgaaggcatcattctgcttcataccgctttttctcgcatgccgaatcagccgaaaacatacgttcagcacgtaatggaacaagacggcaagaaattgattgaacttcttgatcaaggagcgcacttctatatttgcggagacggaattcaaatggcacctgccgttgaagcaacgcttatgaaaagctatgctgacgttcaccaagtgtcggaagcagacgctcgcttatggctgcagcagctagaagaaaaaggccgatacgcaaaagacgtgtggctgggg

SEQ ID NO: 1298 - protein, 1049 aa, synthetic construct
  REGION 1..1049: note = variant of P450 oxidase from Bacillus megaterium
MTIKEMPQPKTFGELKNLPLLNTDKPVQALMRIADELGEIFKFEAPGSVTRYLSSQRLIKEACDESRFDKNLSQGLKFARDFVGDGLVTSWTHEPNWKKAHNILVPSFSQRAMGRYHAMMVDIAVQLVQKWGRLNADEHIEVSEDMTRLTLDTIGLCLFNYRFNSFYRDTPHPFIVSVVRALDEVMNKLQRANPDDPAYDENKRQCQEDIKVMNDYVDKIIADRKNRGEQSHDLLTQMLNGKDPETGEPLDDGNIRQQIITFLIAGHQTTSGLLSFALYFLVKNPRVLQKVAEEAARVLVDPVPSYKQVKQLKYVGMVLNEALRLWPVAPMFSLYAKEDTVLGGEYPLTKGDEVMVLVPQLHRDKIIWGDDVEEFRPERFENPSAIPQHAFKPFGNGQRACIGQQFALHSATLVLGMMLKHFDFEDHTNYELVIKESRTLKPEGFVVKAKSKGIPLGGIPSPSTEQGAKKVRKKAENAHNTPLLVLYGSNAGTAEGTARDLADIAMSKGFAPQVATLDSHAGNLPREGAVLIVTASYNGHPPDNAKQFVDWLDQASADEVKGVRYSVFGCGDKNWAGTYQKVPAFIDETLAAKGAENIAKRGEADASDDFEGAYEEWRDHMWSDVAAYFGLDIENSEDNKSTLSLQFVDSAADMPLAKMHDAFSTNVVASKELQQPGSARSTRHLEIELPKEASYQEGDHLGVIPRYYEGIVNRVTQRFGLSASQLIRLEAEEEKLAHLPLAKTVSVEELLQYVELQDPVTRTQLRAMAAKTVCPPHKVELEALLGKQAYKVQVLAKRLTMLELLEKYPACEMSFSEFIALLPSIRPRYYSISSSPRVDLKQASITVSVVSGPAWSGYGEYKGIASNYLAELQEGDTITCFISTPQSEFTLPKDPETPLIMVGPGTGVAPFRGFVQARKQLKEQGQSLGEAHLYFGCRSPHEDYLYQEELENAQSEGIILLHTAFSRMPNQPKTYVQHVMEQDGKKLIELLDQGAHFYICGDGIQMAPAVEATLMKSYADVHQVSEADARLWLQQLEEKGRYAKDVWLG

SEQ ID NO: 1299 - DNA, 3147 bp, synthetic construct
  misc_feature 1..3147: note = variant of P450 oxidase from Bacillus megaterium
  source 1..3147: mol_type = other DNA
atgacaattaaggaaatgcctcagcctaagacgtttggagaacttaaaaatttaccgttattaaatacagataaaccggttcaagctttgatgcgtattgcggatgaattaggagaaatctttaaattcgaggcgcctggtagcgtaacgcgctatttatcaagtcagcgtctaattaaagaagcatgcgatgaatcacgctttgataaaaacttaagtcaagggcttaaatttgcacgtgattttgttggagacgggctggttacaagctggacgcatgaaccgaattggaaaaaagcgcataatatcttagttccaagctttagtcagcgcgcaatggggcgttatcatgcgatgatggtcgatatcgccgtgcagcttgttcaaaagtgggggcgtctaaatgcagatgagcatattgaagtatcggaagacatgacacgtttaacgcttgatacaattggtctttgcctgtttaactatcgctttaacagcttttaccgagatacgcctcatccatttattgtgagtgtggttcgtgcactggatgaagtaatgaacaagctgcagcgagcaaatccagacgacccagcttatgatgaaaacaagcgccagtgtcaagaagatatcaaggtgatgaacgactatgtagataaaattattgcagatcgcaaaaacaggggtgaacaaagtcatgatttattaacccagatgctaaacggaaaagatccagaaacgggtgagccgcttgatgacgggaatattcgtcagcaaattattacattcttaattgcgggacaccaaacgacaagtggtcttttatcatttgcgctgtatttcttagtgaaaaatccacgtgtattacaaaaggtagcagaagaagcagcacgagttctagtagatcctgttccaagctacaaacaagtcaaacagcttaaatatgttggcatggtcttaaacgaagcgctgcgcttatggccagtagcgcctatgttttccctatatgcaaaagaagatacggtgcttggaggagaatatcctttaacgaaaggcgacgaagtaatggttctggtgcctcagcttcaccgtgataaaatcatttggggagacgatgtggaggagttccgtccagagcgttttgaaaatccaagtgcgattccgcagcatgcgtttaaaccgtttggaaacggtcagcgtgcgtgtatcggtcagcagttcgctcttcatagtgcaacgctggtacttggtatgatgctaaaacactttgactttgaagatcatacaaactacgagctcgtcattaaagaatcgcggacgttaaaacctgaaggctttgtggtaaaagcaaaatcgaaaggcattccgcttggcggtattccttcaccttcgactgaacagggtgctaaaaaagtacgcaaaaaggcagaaaacgctcataatacgccgctgcttgtgctatacggttcaaatgcgggaacagctgaaggaacggcgcgtgatttagcagatattgcaatgagcaaaggatttgcaccgcaggtcgcaacgcttgattcacacgccggtaatcttccgcgcgaaggagctgtattaattgtaacggcgtcttataacggtcatccgcctgataacgcaaagcaatttgtcgattggttagaccaagcgtctgcggatgaagtaaaaggcgttcgctactccgtatttggatgcggcgataaaaattgggcggggacgtatcaaaaagtgcctgcttttatcgatgaaacgcttgccgctaaaggggcagaaaacatcgctaagcgcggtgaagcagatgcaagcgacgactttgaaggcgcgtatgaagaatggcgtgatcatatgtggagtgacgtagcagcctactttggtctcgacattgaaaacagtgaagataataaatctactctttcacttcaatttgtcgacagcgcggcggatatgcctcttgcgaaaatgcacgatgcgttttcaacgaacgtcgtagcaagcaaagaacttcaacagcctggcagtgcacgaagcacgcgacatcttgaaattgaacttccaaaagaagcttcttatcaagaaggagatcatttaggtgttattcctcgctattatgaaggaatagtaaaccgtgtaacacagaggttcggcctaagcgcatcacagctgatccgtctggaagcagaagaagaaaaattagctcatttgccactcgctaaaacagtatccgtagaagagcttctgcaatacgtggagcttcaagatcctgttacgcgcacgcagcttcgcgcaatggctgctaaaacggtctgcccgccgcataaagtagagcttgaagccttgcttggcaagcaagcctataaagaacaggtgctggcaaaacgtttaacaatgcttgaactgcttgaaaaatacccggcgtgtgaaatgagtttcagcgaatttatcgcccttctgccaagcatacgcccgcgctattactcgatttcttcatcacctcgtgtcgatctgaaacaagcaagcatcacggtcagcgttgtcagcggaccggcgtggagcggatatggagaatataaaggaattgcgtcgaactatcttgctgagctgcaagaaggagatacgattacgtgctttatttccacaccgcagtcagagtttacgctgccaaaagaccctgaaacgccgcttatcatggtcggaccgggaacaggcgtcgcgccgtttagaggctttgtgcaggcgcgcaaacagctaaaagaacaaggacagtcacttggagaagcacatttatacttcggctgccgttcacctcatgaagactatctgtatcaagaagagcttgaaaacgcccaaagcgaaggcatcattctgcttcataccgctttttctcgcatgccgaatcagccgaaaacatacgttcagcacgtaatggaacaagacggcaagaaattgattgaacttcttgatcaaggagcgcacttctatatttgcggagacggaattcaaatggcacctgccgttgaagcaacgcttatgaaaagctatgctgacgttcaccaagtgtcggaaagggacgctcgcttatggctgcagcagctagaagaaaaaggccgatacgcaaaagacgtgtggctgggg

SEQ ID NO: 1300 - protein, 1049 aa, synthetic construct
  REGION 1..1049: note = variant of P450 oxidase from Bacillus megaterium
MTIKEMPQPKTFGELKNLPLLNTDKPVQALMRIADELGEIFKFEAPGSVTRYLSSQRLIKEACDESRFDKNLSQGLKFARDFVGDGLVTSWTHEPNWKKAHNILVPSFSQRAMGRYHAMMVDIAVQLVQKWGRLNADEHIEVSEDMTRLTLDTIGLCLFNYRFNSFYRDTPHPFIVSVVRALDEVMNKLQRANPDDPAYDENKRQCQEDIKVMNDYVDKIIADRKNRGEQSHDLLTQMLNGKDPETGEPLDDGNIRQQIITFLIAGHQTTSGLLSFALYFLVKNPRVLQKVAEEAARVLVDPVPSYKQVKQLKYVGMVLNEALRLWPVAPMFSLYAKEDTVLGGEYPLTKGDEVMVLVPQLHRDKIIWGDDVEEFRPERFENPSAIPQHAFKPFGNGQRACIGQQFALHSATLVLGMMLKHFDFEDHTNYELVIKESRTLKPEGFVVKAKSKGIPLGGIPSPSTEQGAKKVRKKAENAHNTPLLVLYGSNAGTAEGTARDLADIAMSKGFAPQVATLDSHAGNLPREGAVLIVTASYNGHPPDNAKQFVDWLDQASADEVKGVRYSVFGCGDKNWAGTYQKVPAFIDETLAAKGAENIAKRGEADASDDFEGAYEEWRDHMWSDVAAYFGLDIENSEDNKSTLSLQFVDSAADMPLAKMHDAFSTNVVASKELQQPGSARSTRHLEIELPKEASYQEGDHLGVIPRYYEGIVNRVTQRFGLSASQLIRLEAEEEKLAHLPLAKTVSVEELLQYVELQDPVTRTQLRAMAAKTVCPPHKVELEALLGKQAYKEQVLAKRLTMLELLEKYPACEMSFSEFIALLPSIRPRYYSISSSPRVDLKQASITVSVVSGPAWSGYGEYKGIASNYLAELQEGDTITCFISTPQSEFTLPKDPETPLIMVGPGTGVAPFRGFVQARKQLKEQGQSLGEAHLYFGCRSPHEDYLYQEELENAQSEGIILLHTAFSRMPNQPKTYVQHVMEQDGKKLIELLDQGAHFYICGDGIQMAPAVEATLMKSYADVHQVSERDARLWLQQLEEKGRYAKDVWLG

SEQ ID NO: 1301 - DNA, 3147 bp, synthetic construct
  misc_feature 1..3147: note = variant of P450 oxidase from Bacillus megaterium
  source 1..3147: mol_type = other DNA
atgacaattaaggaaatgcctcagcctaagacgtttggagaacttaaaaatttaccgttattaaatacagataaaccggttcaagctttgatgcgtattgcggatgaattaggagaaatctttaaattcgaggcgcctggtagcgtaacgcgctatttatcaagtcagcgtctaattaaagaagcatgcgatgaatcacgctttgataaaaacttaagtcaagggcttaaatttgcacgtgattttgttggagacgggctggttacaagctggacgcatgaaccgaattggaaaaaagcgcataatatcttagttccaagctttagtcagcgcgcaatggggcgttatcatgcgatgatggtcgatatcgccgtgcagcttgttcaaaagtgggggcgtctaaatgcagatgagcatattgaagtatcggaagacatgacacgtttaacgcttgatacaattggtctttgcctgtttaactatcgctttaacagcttttaccgagatacgcctcatccatttattgtgagtgtggttcgtgcactggatgaagtaatgaacaagctgcagcgagcaaatccagacgacccagcttatgatgaaaacaagcgccagtgtcaagaagatatcaaggtgatgaacgactatgtagataaaattattgcagatcgcaaaaacaggggtgaacaaagtcatgatttattaacccagatgctaaacggaaaagatccagaaacgggtgagccgcttgatgacgggaatattcgtcagcaaattattacattcttaattgcgggacaccaaacgacaagtggtcttttatcatttgcgctgtatttcttagtgaaaaatccacgtgtattacaaaaggtagcagaagaagcagcacgagttctagtagatcctgttccaagctacaaacaagtcaaacagcttaaatatgttggcatggtcttaaacgaagcgctgcgcttatggccagtagcgcctatgttttccctatatgcaaaagaagatacggtgcttggaggagaatatcctttaacgaaaggcgacgaagtaatggttctggtgcctcagcttcaccgtgataaaatcatttggggagacgatgtggaggagttccgtccagagcgttttgaaaatccaagtgcgattccgcagcatgcgtttaaaccgtttggaaacggtcagcgtgcgtgtatcggtcagcagttcgctcttcatagtgcaacgctggtacttggtatgatgctaaaacactttgactttgaagatcatacaaactacgagctcgtcattaaagaatcgcggacgttaaaacctgaaggctttgtggtaaaagcaaaatcgaaaggcattccgcttggcggtattccttcaccttcgactgaacagggtgctaaaaaagtacgcaaaaaggcagaaaacgctcataatacgccgctgcttgtgctatacggttcaaatgcgggaacagctgaaggaacggcgcgtgatttagcagatattgcaatgagcaaaggatttgcaccgcaggtcgcaacgcttgattcacacgccggtaatcttccgcgcgaaggagctgtattaattgtaacggcgtcttataacggtcatccgcctgataacgcaaagcaatttgtcgattggttagaccaagcgtctgcggatgaagtaaaaggcgttcgctactccgtatttggatgcggcgataaaaattgggcggggacgtatcaaaaagtgcctgcttttatcgatgaaacgcttgccgctaaaggggcagaaaacatcgctaagcgcggtgaagcagatgcaagcgacgactttgaaggcgcgtatgaagaatggcgtgatcatatgtggagtgacgtagcagcctactttggtctcgacattgaaaacagtgaagataataaatctactctttcacttcaatttgtcgacagcgcggcggatatgcctcttgcgaaaatgcacgatgcgttttcaacgaacgtcgtagcaagcaaagaacttcaacagcctggcagtgcacgaagcacgcgacatcttgaaattgaacttccaaaagaagcttcttatcaagaaggagatcatttaggtgttattcctcgctattatgaaggaatagtaaaccgtgtaacacagaggttcggcctaagcgcatcacagctgatccgtctggaagcagaagaagaaaaattagctcatttgccactcgctaaaacagtatccgtagaagagcttctgcaatacgtggagcttcaagatcctgttacgcgcacgcagcttcgcgcaatggctgctaaaacggtctgcccgccgcataaagtagagcttgaagccttgcttggcaagcaagcctataaagaacaggtgctggcaaaacgtttaacaatgcttgaactgcttgaaaaatacccggcgtgtgaaatgagtttcagcgaatttatcgcccttctgccaagcatacgcccgcgctattactcgatttcttcatcacctcgtgtcgatctgaaacaagcaagcatcacggtcagcgttgtcagcggaccggcgtggagcggatatggagaatataaaggaattgcgtcgaactatcttgctgagctgcaagaaggagatacgattacgtgctttatttccacaccgcagtcagagtttacgctgccaaaagaccctgaaacgccgcttatcatggtcggaccgggaacaggcgtcgcgccgtttagaggctttgtgcaggcgcgcaaacagctaaaagaacaaggacagtcacttggagaagcacatttatacttcggctgccgttcacctcatgaagactatctgtatcaagaagagcttgaaaacgcccaaagcgaaggcatcattctgcttcataccgctttttctcgcatgccgaatcagccgaaaacatacgttcagcacgtaatggaacaagacggcaagaaattgattgaacttcttgatcaaggagcgcacttctatatttgcggagacggaattcaaatggcacctgccgttgaagcaacgcttatgaaaagctatgctgacgtttcgcaagtgtcggaagcagacgctcgcttatggctgcagcagctagaagaaaaaggccgatacgcaaaagacgtgtggctgggg

SEQ ID NO: 1302 - protein, 1049 aa, synthetic construct
  REGION 1..1049: note = variant of P450 oxidase from Bacillus megaterium
MTIKEMPQPKTFGELKNLPLLNTDKPVQALMRIADELGEIFKFEAPGSVTRYLSSQRLIKEACDESRFDKNLSQGLKFARDFVGDGLVTSWTHEPNWKKAHNILVPSFSQRAMGRYHAMMVDIAVQLVQKWGRLNADEHIEVSEDMTRLTLDTIGLCLFNYRFNSFYRDTPHPFIVSVVRALDEVMNKLQRANPDDPAYDENKRQCQEDIKVMNDYVDKIIADRKNRGEQSHDLLTQMLNGKDPETGEPLDDGNIRQQIITFLIAGHQTTSGLLSFALYFLVKNPRVLQKVAEEAARVLVDPVPSYKQVKQLKYVGMVLNEALRLWPVAPMFSLYAKEDTVLGGEYPLTKGDEVMVLVPQLHRDKIIWGDDVEEFRPERFENPSAIPQHAFKPFGNGQRACIGQQFALHSATLVLGMMLKHFDFEDHTNYELVIKESRTLKPEGFVVKAKSKGIPLGGIPSPSTEQGAKKVRKKAENAHNTPLLVLYGSNAGTAEGTARDLADIAMSKGFAPQVATLDSHAGNLPREGAVLIVTASYNGHPPDNAKQFVDWLDQASADEVKGVRYSVFGCGDKNWAGTYQKVPAFIDETLAAKGAENIAKRGEADASDDFEGAYEEWRDHMWSDVAAYFGLDIENSEDNKSTLSLQFVDSAADMPLAKMHDAFSTNVVASKELQQPGSARSTRHLEIELPKEASYQEGDHLGVIPRYYEGIVNRVTQRFGLSASQLIRLEAEEEKLAHLPLAKTVSVEELLQYVELQDPVTRTQLRAMAAKTVCPPHKVELEALLGKQAYKEQVLAKRLTMLELLEKYPACEMSFSEFIALLPSIRPRYYSISSSPRVDLKQASITVSVVSGPAWSGYGEYKGIASNYLAELQEGDTITCFISTPQSEFTLPKDPETPLIMVGPGTGVAPFRGFVQARKQLKEQGQSLGEAHLYFGCRSPHEDYLYQEELENAQSEGIILLHTAFSRMPNQPKTYVQHVMEQDGKKLIELLDQGAHFYICGDGIQMAPAVEATLMKSYADVSQVSEADARLWLQQLEEKGRYAKDVWLG

SEQ ID NO: 1303 - DNA, 3147 bp, synthetic construct
  misc_feature 1..3147: note = variant of P450 oxidase from Bacillus megaterium
  source 1..3147: mol_type = other DNA
atgacaattaaggaaatgcctcagcctaagacgtttggagaacttaaaaatttaccgttattaaatacagataaaccggttcaagctttgatgcgtattgcggatgaattaggagaaatctttaaattcgaggcgcctggtagcgtaacgcgctatttatcaagtcagcgtctaattaaagaagcatgcgatgaatcacgctttgataaaaacttaagtcaagggcttaaatttgcacgtgattttgttggagacgggctggttacaagctggacgcatgaaccgaattggaaaaaagcgcataatatcttagttccaagctttagtcagcgcgcaatggggcgttatcatgcgatgatggtcgatatcgccgtgcagcttgttcaaaagtgggggcgtctaaatgcagatgagcatattgaagtatcggaagacatgacacgtttaacgcttgatacaattggtctttgcctgtttaactatcgctttaacagcttttaccgagatacgcctcatccatttattgtgagtgtggttcgtgcactggatgaagtaatgaacaagctgcagcgagcaaatccagacgacccagcttatgatgaaaacaagcgccagtgtcaagaagatatcaaggtgatgaacgactatgtagataaaattattgcagatcgcaaaaacaggggtgaacaaagtcatgatttattaacccagatgctaaacggaaaagatccagaaacgggtgagccgcttgatgacgggaatattcgtcagcaaattattacattcttaattgcgggacaccaaacgacaagtggtcttttatcatttgcgctgtatttcttagtgaaaaatccacgtgtattacaaaaggtagcagaagaagcagcacgagttctagtagatcctgttccaagctacaaacaagtcaaacagcttaaatatgttggcatggtcttaaacgaagcgctgcgcttatggccagtagcgcctatgttttccctatatgcaaaagaagatacggtgcttggaggagaatatcctttaacgaaaggcgacgaagtaatggttctggtgcctcagcttcaccgtgataaaatcatttggggagacgatgtggaggagttccgtccagagcgttttgaaaatccaagtgcgattccgcagcatgcgtttaaaccgtttggaaacggtcagcgtgcgtgtatcggtcagcagttcgctcttcatagtgcaacgctggtacttggtatgatgctaaaacactttgactttgaagatcatacaaactacgagctcgtcattaaagaatcgcggacgttaaaacctgaaggctttgtggtaaaagcaaaatcgaaaggcattccgcttggcggtattccttcaccttcgactgaacagggtgctaaaaaagtacgcaaaaaggcagaaaacgctcataatacgccgctgcttgtgctatacggttcaaatgcgggaacagctgaaggaacggcgcgtgatttagcagatattgcaatgagcaaaggatttgcaccgcaggtcgcaacgcttgattcacacgccggtaatcttccgcgcgaaggagctgtattaattgtaacggcgtcttataacggtcatccgcctgataacgcaaagcaatttgtcgattggttagaccaagcgtctgcggatgaagtaaaaggcgttcgctactccgtatttggatgcggcgataaaaattgggcggggacgtatcaaaaagtgcctgcttttatcgatgaaacgcttgccgctaaaggggcagaaaacatcgctaagcgcggtgaagcagatgcaagcgacgactttgaaggcgcgtatgaagaatggcgtgatcatatgtggagtgacgtagcagcctactttggtctcgacattgaaaacagtgaagataataaatctactctttcacttcaatttgtcgacagcgcggcggatatgcctcttgcgaaaatgcacgatgcgttttcaacgaacgtcgtagcaagcaaagaacttcaacagcctggcagtgcacgaagcacgcgacatcttgaaattgaacttccaaaagaagcttcttatcaagaaggagatcatttaggtgttattcctcgctattatgaaggaatagtaaaccgtgtaacacagaggttcggcctaagcgcatcacagctgatccgtctggaagcagaagaagaaaaattagctcatttgccactcgctaaaacagtatccgtagaagagcttctgcaatacgtggagcttcaagatcctgttacgcgcacgcagcttcgcgcaatggctgctaaaacggtctgcccgccgcataaagtagagcttgaagccttgcttggcaagcaagcctataaagaacaggtgctggcaaaacgtttaacaatgcttgaactgcttgaaaaatacccggcgtgtgaaatgagtttcagcgaatttatcgcccttctgccaagcatacgcccgcgctattactcgatttcttcatcacctcgtgtcgatctgaaacaagcaagcatcacggtcagcgttgtcagcggaccggcgtggagcggatatggagaatataaaggaattgcgtcgaactatcttgctgagctgcaagaaggagatacgattacgtgctttatttccacaccgcagtcagagtttacgctgccaaaagaccctgaaacgccgcttatcatggtcggaccgggaacaggcgtcgcgccgtttagaggctttgtgcaggcgcgcaaacagctaaaagaacaaggacagtcacttggagaagcacatttatacttcggctgccgttcacctcatgaagactatctgtatcaagaagagcttgaaaacgcccaaagcgaaggcatcattctgcttcataccgctttttctcgcatgccgaatcagccgaaaacatacgttcagcacgtaatggaacaagacggcaagaaattgattgaacttcttgatcaaggagcgcacttctatatttgcggagacggaattcaaatggcacctgccgttgaagcaacgcttatgaaaagctatgctgacgttcaccaagtgtcggaagcagacgctcgccagtggctgcagcagctagaagaaaaaggccgatacgcaaaagacgtgtggctgggg

SEQ ID NO: 1304 - protein, 1049 aa, synthetic construct
  REGION 1..1049: note = variant of P450 oxidase from Bacillus megaterium
MTIKEMPQPKTFGELKNLPLLNTDKPVQALMRIADELGEIFKFEAPGSVTRYLSSQRLIKEACDESRFDKNLSQGLKFARDFVGDGLVTSWTHEPNWKKAHNILVPSFSQRAMGRYHAMMVDIAVQLVQKWGRLNADEHIEVSEDMTRLTLDTIGLCLFNYRFNSFYRDTPHPFIVSVVRALDEVMNKLQRANPDDPAYDENKRQCQEDIKVMNDYVDKIIADRKNRGEQSHDLLTQMLNGKDPETGEPLDDGNIRQQIITFLIAGHQTTSGLLSFALYFLVKNPRVLQKVAEEAARVLVDPVPSYKQVKQLKYVGMVLNEALRLWPVAPMFSLYAKEDTVLGGEYPLTKGDEVMVLVPQLHRDKIIWGDDVEEFRPERFENPSAIPQHAFKPFGNGQRACIGQQFALHSATLVLGMMLKHFDFEDHTNYELVIKESRTLKPEGFVVKAKSKGIPLGGIPSPSTEQGAKKVRKKAENAHNTPLLVLYGSNAGTAEGTARDLADIAMSKGFAPQVATLDSHAGNLPREGAVLIVTASYNGHPPDNAKQFVDWLDQASADEVKGVRYSVFGCGDKNWAGTYQKVPAFIDETLAAKGAENIAKRGEADASDDFEGAYEEWRDHMWSDVAAYFGLDIENSEDNKSTLSLQFVDSAADMPLAKMHDAFSTNVVASKELQQPGSARSTRHLEIELPKEASYQEGDHLGVIPRYYEGIVNRVTQRFGLSASQLIRLEAEEEKLAHLPLAKTVSVEELLQYVELQDPVTRTQLRAMAAKTVCPPHKVELEALLGKQAYKEQVLAKRLTMLELLEKYPACEMSFSEFIALLPSIRPRYYSISSSPRVDLKQASITVSVVSGPAWSGYGEYKGIASNYLAELQEGDTITCFISTPQSEFTLPKDPETPLIMVGPGTGVAPFRGFVQARKQLKEQGQSLGEAHLYFGCRSPHEDYLYQEELENAQSEGIILLHTAFSRMPNQPKTYVQHVMEQDGKKLIELLDQGAHFYICGDGIQMAPAVEATLMKSYADVHQVSEADARQWLQQLEEKGRYAKDVWLG

SEQ ID NO: 1305 - DNA, 3147 bp, synthetic construct
  misc_feature 1..3147: note = variant of P450 oxidase from Bacillus megaterium
  source 1..3147: mol_type = other DNA
atgacaattaaggaaatgcctcagcctaagacgtttggagaacttaaaaatttaccgttattaaatacagataaaccggttcaagctttgatgcgtattgcggatgaattaggagaaatctttaaattcgaggcgcctggtagcgtaacgcgctatttatcaagtcagcgtctaattaaagaagcatgcgatgaatcacgctttgataaaaacttaagtcaagggcttaaatttgcacgtgattttgttggagacgggctggttacaagctggacgcatgaaccgaattggaaaaaagcgcataatatcttagttccaagctttagtcagcgcgcaatggggcgttatcatgcgatgatggtcgatatcgccgtgcagcttgttcaaaagtgggggcgtctaaatgcagatgagcatattgaagtatcggaagacatgacacgtttaacgcttgatacaattggtctttgcctgtttaactatcgctttaacagcttttaccgagatacgcctcatccatttattgtgagtgtggttcgtgcactggatgaagtaatgaacaagctgcagcgagcaaatccagacgacccagcttatgatgaaaacaagcgccagtgtcaagaagatatcaaggtgatgaacgactatgtagataaaattattgcagatcgcaaaaacaggggtgaacaaagtcatgatttattaacccagatgctaaacggaaaagatccagaaacgggtgagccgcttgatgacgggaatattcgtcagcaaattattacattcttaattgcgggacaccaaacgacaagtggtcttttatcatttgcgctgtatttcttagtgaaaaatccacgtgtattacaaaaggtagcagaagaagcagcacgagttctagtagatcctgttccaagctacaaacaagtcaaacagcttaaatatgttggcatggtcttaaacgaagcgctgcgcttatggccagtagcgcctatgttttccctatatgcaaaagaagatacggtgcttggaggagaatatcctttaacgaaaggcgacgaagtaatggttctggtgcctcagcttcaccgtgataaaatcatttggggagacgatgtggaggagttccgtccagagcgttttgaaaatccaagtgcgattccgcagcatgcgtttaaaccgtttggaaacggtcagcgtgcgtgtatcggtcagcagttcgctcttcatagtgcaacgctggtacttggtatgatgctaaaacactttgactttgaagatcatacaaactacgagctcgtcattaaagaatcgcggacgttaaaacctgaaggctttgtggtaaaagcaaaatcgaaaggcattccgcttggcggtattccttcaccttcgactgaacagggtgctaaaaaagtacgcaaaaaggcagaaaacgctcataatacgccgctgcttgtgctatacggttcaaatgcgggaacagctgaaggaacggcgcgtgatttagcagatattgcaatgagcaaaggatttgcaccgcaggtcgcaacgcttgattcacacgccggtaatcttccgcgcgaaggagctgtattaattgtaacggcgtcttataacggtcatccgcctgataacgcaaagcaatttgtcgattggttagaccaagcgtctgcggatgaagtaaaaggcgttcgctactccgtatttggatgcggcgataaaaattgggcggggacgtatcaaaaagtgcctgcttttatcgatgaaacgcttgccgctaaaggggcagaaaacatcgctaagcgcggtgaagcagatgcaagcgacgactttgaaggcgcgtatgaagaatggcgtgatcatatgtggagtgacgtagcagcctactttggtctcgacattgaaaacagtgaagataataaatctactctttcacttcaatttgtcgacagcgcggcggatatgcctcttgcgaaaatgcacgatgcgttttcaacgaacgtcgtagcaagcaaagaacttcaacagcctggcagtgcacgaagcacgcgacatcttgaaattgaacttccaaaagaagcttcttatcaagaaggagatcatttaggtgttattcctcgctattatgaaggaatagtaaaccgtgtaacacagaggttcggcctaagcgcatcacagctgatccgtctggaagcagaagaagaaaaattagctcatttgccactcgctaaaacagtatccgtagaagagcttctgcaatacgtggagcttcaagatcctgttacgcgcacgcagcttcgcgcaatggctgctaaaacggtctgcccgccgcataaagtagagcttgaagccttgcttggcaagcaagcctataaagaacaggtgctggcaaaacgtttaacaatgcttgaactgcttgaaaaatacccggcgtgtgaaatgagtttcagcgaatttatcgcccttctgccaagcatacgcccgcgctattactcgatttcttcatcacctcgtgtcgatctgaaacaagcaagcatcacggtcagcgttgtcagcggaccggcgtggagcggatatggagaatataaaggaattgcgtcgaactatcttgctgagctgcaagaaggagatacgattacgtgctttatttccacaccgcagtcagagtttacgctgccaaaagaccctgaaacgccgcttatcatggtcggaccgggaacaggcgtcgcgccgtttagaggctttgtgcaggcgcgcaaacagctaaaagaacaaggacagtcacttggagaagcacatttatacttcggctgccgttcacctcatgaagactatctgtatcaagaagagcttgaaaacgcccaaagcgaaggcatcattctgcttcataccgctttttctcgcatgccgaatcagccgaaaacatacgttcagcacgtaatgaatcaagacggcaagaaattgattgaacttcttgatcaaggagcgcacttctatatttgcggagacggaattcaaatggcacctgccgttgaagcaacgcttatgaaaagctatgctgacgttcaccaagtgtcggaagcagacgctcgcttatggctgcagcagctagaagaaaaaggccgatacgcaaaagacgtgtggctgggg

SEQ ID NO: 1306 - protein, 1049 aa, synthetic construct
  REGION 1..1049: note = variant of P450 oxidase from Bacillus megaterium
MTIKEMPQPKTFGELKNLPLLNTDKPVQALMRIADELGEIFKFEAPGSVTRYLSSQRLIKEACDESRFDKNLSQGLKFARDFVGDGLVTSWTHEPNWKKAHNILVPSFSQRAMGRYHAMMVDIAVQLVQKWGRLNADEHIEVSEDMTRLTLDTIGLCLFNYRFNSFYRDTPHPFIVSVVRALDEVMNKLQRANPDDPAYDENKRQCQEDIKVMNDYVDKIIADRKNRGEQSHDLLTQMLNGKDPETGEPLDDGNIRQQIITFLIAGHQTTSGLLSFALYFLVKNPRVLQKVAEEAARVLVDPVPSYKQVKQLKYVGMVLNEALRLWPVAPMFSLYAKEDTVLGGEYPLTKGDEVMVLVPQLHRDKIIWGDDVEEFRPERFENPSAIPQHAFKPFGNGQRACIGQQFALHSATLVLGMMLKHFDFEDHTNYELVIKESRTLKPEGFVVKAKSKGIPLGGIPSPSTEQGAKKVRKKAENAHNTPLLVLYGSNAGTAEGTARDLADIAMSKGFAPQVATLDSHAGNLPREGAVLIVTASYNGHPPDNAKQFVDWLDQASADEVKGVRYSVFGCGDKNWAGTYQKVPAFIDETLAAKGAENIAKRGEADASDDFEGAYEEWRDHMWSDVAAYFGLDIENSEDNKSTLSLQFVDSAADMPLAKMHDAFSTNVVASKELQQPGSARSTRHLEIELPKEASYQEGDHLGVIPRYYEGIVNRVTQRFGLSASQLIRLEAEEEKLAHLPLAKTVSVEELLQYVELQDPVTRTQLRAMAAKTVCPPHKVELEALLGKQAYKEQVLAKRLTMLELLEKYPACEMSFSEFIALLPSIRPRYYSISSSPRVDLKQASITVSVVSGPAWSGYGEYKGIASNYLAELQEGDTITCFISTPQSEFTLPKDPETPLIMVGPGTGVAPFRGFVQARKQLKEQGQSLGEAHLYFGCRSPHEDYLYQEELENAQSEGIILLHTAFSRMPNQPKTYVQHVMNQDGKKLIELLDQGAHFYICGDGIQMAPAVEATLMKSYADVHQVSEADARLWLQQLEEKGRYAKDVWLG

SEQ ID NO: 1307 - DNA, 3147 bp, synthetic construct
  misc_feature 1..3147: note = variant of P450 oxidase from Bacillus megaterium
  source 1..3147: mol_type = other DNA
atgacaattaaggaaatgcctcagcctaagacgtttggagaacttaaaaatttaccgttattaaatacagataaaccggttcaagctttgatgcgtattgcggatgaattaggagaaatctttaaattcgaggcgcctggtagcgtaacgcgctatttatcaagtcagcgtctaattaaagaagcatgcgatgaatcacgctttgataaaaacttaagtcaagggcttaaatttgcacgtgattttgttggagacgggctggttacaagctggacgcatgaaccgaattggaaaaaagcgcataatatcttagttccaagctttagtcagcgcgcaatggggcgttatcatgcgatgatggtcgatatcgccgtgcagcttgttcaaaagtgggggcgtctaaatgcagatgagcatattgaagtatcggaagacatgacacgtttaacgcttgatacaattggtctttgcctgtttaactatcgctttaacagcttttaccgagatacgcctcatccatttattgtgagtgtggttcgtgcactggatgaagtaatgaacaagctgcagcgagcaaatccagacgacccagcttatgatgaaaacaagcgccagtgtcaagaagatatcaaggtgatgaacgactatgtagataaaattattgcagatcgcaaaaacaggggtgaacaaagtcatgatttattaacccagatgctaaacggaaaagatccagaaacgggtgagccgcttgatgacgggaatattcgtcagcaaattattacattcttaattgcgggacaccaaacgacaagtggtcttttatcatttgcgctgtatttcttagtgaaaaatccacgtgtattacaaaaggtagcagaagaagcagcacgagttctagtagatcctgttccaagctacaaacaagtcaaacagcttaaatatgttggcatggtcttaaacgaagcgctgcgcttatggccagtagcgcctatgttttccctatatgcaaaagaagatacggtgcttggaggagaatatcctttaacgaaaggcgacgaagtaatggttctggtgcctcagcttcaccgtgataaaatcatttggggagacgatgtggaggagttccgtccagagcgttttgaaaatccaagtgcgattccgcagcatgcgtttaaaccgtttggaaacggtcagcgtgcgtgtatcggtcagcagttcgctcttcatagtgcaacgctggtacttggtatgatgctaaaacactttgactttgaagatcatacaaactacgagctcgtcattaaagaatcgcggacgttaaaacctgaaggctttgtggtaaaagcaaaatcgaaaggcattccgcttggcggtattccttcaccttcgactgaacagggtgctaaaaaagtacgcaaaaaggcagaaaacgctcataatacgccgctgcttgtgctatacggttcaaatgcgggaacagctgaaggaacggcgcgtgatttagcagatattgcaatgagcaaaggatttgcaccgcaggtcgcaacgcttgattcacacgccggtaatcttccgcgcgaaggagctgtattaattgtaacggcgtcttataacggtcatccgcctgataacgcaaagcaatttgtcgattggttagaccaagcgtctgcggatgaagtaaaaggcgttcgctactccgtatttggatgcggcgataaaaattgggcggggacgtatcaaaaagtgcctgcttttatcgatgaaacgcttgccgctaaaggggcagaaaacatcgctaagcgcggtgaagcagatgcaagcgacgactttgaaggcgcgtatgaagaatggcgtgatcatatgtggagtgacgtagcagcctactttggtctcgacattgaaaacagtgaagataataaatctactctttcacttcaatttgtcgacagcgcggcggatatgcctcttgcgaaaatgcacgatgcgttttcaacgaacgtcgtagcaagcaaagaacttcaacagcctggcagtgcacgaagcacgcgacatcttgaaattgaacttccaaaagaagcttcttatcaagaaggagatcatttaggtgttattcctcgctattatgaaggaatagtaaaccgtgtaacacagaggttcggcctaagcgcatcacagctgatccgtctggaagcagaagaagaaaaattagctcatttgccactcgctaaaacagtatccgtagaagagcttctgcaatacgtggagcttcaagatcctgttacgcgcacgcagcttcgcgcaatggctgctaaaacggtctgcccgccgcataaagtagagcttgaagccttgcttggcaagcaagcctataaagaacaggtgctggcaaaacgtttaacaatgcttgaactgcttgaaaaatacccggcgtgtgaaatgagtttcagcgaatttatcgcccttctgccaagcatacgcccgcgctattactcgatttcttcatcacctcgtgtcgatctgaaacaagcaagcatcacggtcagcgttgtcagcggaccggcgtggagcggatatggagaatataaaggaattgcgtcgaactatcttgctgagctgcaagaaggagatacgattacgtgctttatttccacaccgcagtcagagtttacgctgccaaaagaccctgaaacgccgcttatcatggtcggaccgggaacaggcgtcgcgccgtttagaggctttgtgcaggcgcgcaaacagctaaaagaacaaggaaggtcacttggagaagcacatttatacttcggctgccgttcacctcatgaagactatctgtatcaagaagagcttgaaaacgcccaaagcgaaggcatcattctgcttcataccgctttttctcgcatgccgaatcagccgaaaacatacgttcagcacgtaatggaacaagacggcaagaaattgattgaacttcttgatcaaggagcgcacttctatatttgcggagacggaattcaaatggcacctgccgttgaagcaacgcttatgaaaagctatgctgacgttcaccaagtgtcggaagcagacgctcgcttatggctgcagcagctagaagaaaaaggccgatacgcaaaagacgtgtggctgggg

SEQ ID NO: 1308 - protein, 1049 aa, synthetic construct
  REGION 1..1049: note = variant of P450 oxidase from Bacillus megaterium
MTIKEMPQPKTFGELKNLPLLNTDKPVQALMRIADELGEIFKFEAPGSVTRYLSSQRLIKEACDESRFDKNLSQGLKFARDFVGDGLVTSWTHEPNWKKAHNILVPSFSQRAMGRYHAMMVDIAVQLVQKWGRLNADEHIEVSEDMTRLTLDTIGLCLFNYRFNSFYRDTPHPFIVSVVRALDEVMNKLQRANPDDPAYDENKRQCQEDIKVMNDYVDKIIADRKNRGEQSHDLLTQMLNGKDPETGEPLDDGNIRQQIITFLIAGHQTTSGLLSFALYFLVKNPRVLQKVAEEAARVLVDPVPSYKQVKQLKYVGMVLNEALRLWPVAPMFSLYAKEDTVLGGEYPLTKGDEVMVLVPQLHRDKIIWGDDVEEFRPERFENPSAIPQHAFKPFGNGQRACIGQQFALHSATLVLGMMLKHFDFEDHTNYELVIKESRTLKPEGFVVKAKSKGIPLGGIPSPSTEQGAKKVRKKAENAHNTPLLVLYGSNAGTAEGTARDLADIAMSKGFAPQVATLDSHAGNLPREGAVLIVTASYNGHPPDNAKQFVDWLDQASADEVKGVRYSVFGCGDKNWAGTYQKVPAFIDETLAAKGAENIAKRGEADASDDFEGAYEEWRDHMWSDVAAYFGLDIENSEDNKSTLSLQFVDSAADMPLAKMHDAFSTNVVASKELQQPGSARSTRHLEIELPKEASYQEGDHLGVIPRYYEGIVNRVTQRFGLSASQLIRLEAEEEKLAHLPLAKTVSVEELLQYVELQDPVTRTQLRAMAAKTVCPPHKVELEALLGKQAYKEQVLAKRLTMLELLEKYPACEMSFSEFIALLPSIRPRYYSISSSPRVDLKQASITVSVVSGPAWSGYGEYKGIASNYLAELQEGDTITCFISTPQSEFTLPKDPETPLIMVGPGTGVAPFRGFVQARKQLKEQGRSLGEAHLYFGCRSPHEDYLYQEELENAQSEGIILLHTAFSRMPNQPKTYVQHVMEQDGKKLIELLDQGAHFYICGDGIQMAPAVEATLMKSYADVHQVSEADARLWLQQLEEKGRYAKDVWLG

SEQ ID NO: 1309 - DNA, 3147 bp, synthetic construct
  misc_feature 1..3147: note = variant of P450 oxidase from Bacillus megaterium
  source 1..3147: mol_type = other DNA
atgacaattaaggaaatgcctcagcctaagacgtttggagaacttaaaaatttaccgttattaaatacagataaaccggttcaagctttgatgcgtattgcggatgaattaggagaaatctttaaattcgaggcgcctggtagcgtaacgcgctatttatcaagtcagcgtctaattaaagaagcatgcgatgaatcacgctttgataaaaacttaagtcaagggcttaaatttgcacgtgattttgttggagacgggctggttacaagctggacgcatgaaccgaattggaaaaaagcgcataatatcttagttccaagctttagtcagcgcgcaatggggcgttatcatgcgatgatggtcgatatcgccgtgcagcttgttcaaaagtgggggcgtctaaatgcagatgagcatattgaagtatcggaagacatgacacgtttaacgcttgatacaattggtctttgcctgtttaactatcgctttaacagcttttaccgagatacgcctcatccatttattgtgagtgtggttcgtgcactggatgaagtaatgaacaagctgcagcgagcaaatccagacgacccagcttatgatgaaaacaagcgccagtgtcaagaagatatcaaggtgatgaacgactatgtagataaaattattgcagatcgcaaaaacaggggtgaacaaagtcatgatttattaacccagatgctaaacggaaaagatccagaaacgggtgagccgcttgatgacgggaatattcgtcagcaaattattacattcttaattgcgggacaccaaacgacaagtggtcttttatcatttgcgctgtatttcttagtgaaaaatccacgtgtattacaaaaggtagcagaagaagcagcacgagttctagtagatcctgttccaagctacaaacaagtcaaacagcttaaatatgttggcatggtcttaaacgaagcgctgcgcttatggccagtagcgcctatgttttccctatatgcaaaagaagatacggtgcttggaggagaatatcctttaacgaaaggcgacgaagtaatggttctggtgcctcagcttcaccgtgataaaatcatttggggagacgatgtggaggagttccgtccagagcgttttgaaaatccaagtgcgattccgcagcatgcgtttaaaccgtttggaaacggtcagcgtgcgtgtatcggtcagcagttcgctcttcatagtgcaacgctggtacttggtatgatgctaaaacactttgactttgaagatcatacaaactacgagctcgtcattaaagaatcgcggacgttaaaacctgaaggctttgtggtaaaagcaaaatcgaaaggcattccgcttggcggtattccttcaccttcgactgaacagggtgctaaaaaagtacgcaaaaaggcagaaaacgctcataatacgccgctgcttgtgctatacggttcaaatgcgggaacagctgaaggaacggcgcgtgatttagcagatattgcaatgagcaaaggatttgcaccgcaggtcgcaacgcttgattcacacgccggtaatcttccgcgcgaaggagctgtattaattgtaacggcgtcttataacggtcatccgcctgataacgcaaagcaatttgtcgattggttagaccaagcgtctgcggatgaagtaaaaggcgttcgctactccgtatttggatgcggcgataaaaattgggcggggacgtatcaaaaagtgcctgcttttatcgatgaaacgcttgccgctaaaggggcagaaaacatcgctaagcgcggtgaagcagatgcaagcgacgactttgaaggcgcgtatgaagaatggcgtgatcatatgtggagtgacgtagcagcctactttggtctcgacattgaaaacagtgaagataataaatctactctttcacttcaatttgtcgacagcgcggcggatatgcctcttgcgaaaatgcacgatgcgttttcaacgaacgtcgtagcaagcaaagaacttcaacagcctggcagtgcacgaagcacgcgacatcttgaaattgaacttccaaaagaagcttcttatcaagaaggagatcatttaggtgttattcctcgctattatgaaggaatagtaaaccgtgtaacacagaggttcggcctaagcgcatcacagctgatccgtctggaagcagaagaagaaaaattagctcatttgccactcgctaaaacagtatccgtagaagagcttctgcaatacgtggagcttcaagatcctgttacgcgcacgcagcttcgcgcaatgacggctaaaacggtctgcccgccgcataaagtagagcttgaagccttgcttggcaagcaagcctataaagaacaggtgctggcaaaacgtttaacaatgcttgaactgcttgaaaaatacccggcgtgtgaaatgagtttcagcgaatttatcgcccttctgccaagcatacgcccgcgctattactcgatttcttcatcacctcgtgtcgatctgaaacaagcaagcatcacggtcagcgttgtcagcggaccggcgtggagcggatatggagaatataaaggaattgcgtcgaactatcttgctgagctgcaagaaggagatacgattacgtgctttatttccacaccgcagtcagagtttacgctgccaaaagaccctgaaacgccgcttatcatggtcggaccgggaacaggcgtcgcgccgtttagaggctttgtgcaggcgcgcaaacagctaaaagaacaaggacagtcacttggagaagcacatttatacttcggctgccgttcacctcatgaagactatctgtatcaagaagagcttgaaaacgcccaaagcgaaggcatcattctgcttcataccgctttttctcgcatgccgaatcagccgaaaacatacgttcagcacgtaatggaacaagacggcaagaaattgattgaacttcttgatcaaggagcgcacttctatatttgcggagacggaattcaaatggcacctgccgttgaagcaacgcttatgaaaagctatgctgacgttcaccaagtgtcggaagcagacgctcgcttatggctgcagcagctagaagaaaaaggccgatacgcaaaagacgtgtggctgggg

SEQ ID NO: 1310 - protein, 1049 aa, synthetic construct
  REGION 1..1049: note = variant of P450 oxidase from Bacillus megaterium
MTIKEMPQPKTFGELKNLPLLNTDKPVQALMRIADELGEIFKFEAPGSVTRYLSSQRLIKEACDESRFDKNLSQGLKFARDFVGDGLVTSWTHEPNWKKAHNILVPSFSQRAMGRYHAMMVDIAVQLVQKWGRLNADEHIEVSEDMTRLTLDTIGLCLFNYRFNSFYRDTPHPFIVSVVRALDEVMNKLQRANPDDPAYDENKRQCQEDIKVMNDYVDKIIADRKNRGEQSHDLLTQMLNGKDPETGEPLDDGNIRQQIITFLIAGHQTTSGLLSFALYFLVKNPRVLQKVAEEAARVLVDPVPSYKQVKQLKYVGMVLNEALRLWPVAPMFSLYAKEDTVLGGEYPLTKGDEVMVLVPQLHRDKIIWGDDVEEFRPERFENPSAIPQHAFKPFGNGQRACIGQQFALHSATLVLGMMLKHFDFEDHTNYELVIKESRTLKPEGFVVKAKSKGIPLGGIPSPSTEQGAKKVRKKAENAHNTPLLVLYGSNAGTAEGTARDLADIAMSKGFAPQVATLDSHAGNLPREGAVLIVTASYNGHPPDNAKQFVDWLDQASADEVKGVRYSVFGCGDKNWAGTYQKVPAFIDETLAAKGAENIAKRGEADASDDFEGAYEEWRDHMWSDVAAYFGLDIENSEDNKSTLSLQFVDSAADMPLAKMHDAFSTNVVASKELQQPGSARSTRHLEIELPKEASYQEGDHLGVIPRYYEGIVNRVTQRFGLSASQLIRLEAEEEKLAHLPLAKTVSVEELLQYVELQDPVTRTQLRAMTAKTVCPPHKVELEALLGKQAYKEQVLAKRLTMLELLEKYPACEMSFSEFIALLPSIRPRYYSISSSPRVDLKQASITVSVVSGPAWSGYGEYKGIASNYLAELQEGDTITCFISTPQSEFTLPKDPETPLIMVGPGTGVAPFRGFVQARKQLKEQGQSLGEAHLYFGCRSPHEDYLYQEELENAQSEGIILLHTAFSRMPNQPKTYVQHVMEQDGKKLIELLDQGAHFYICGDGIQMAPAVEATLMKSYADVHQVSEADARLWLQQLEEKGRYAKDVWLG

SEQ ID NO: 1311 - DNA, 3147 bp, synthetic construct
  misc_feature 1..3147: note = variant of P450 oxidase from Bacillus megaterium
  source 1..3147: mol_type = other DNA
atgacaattaaggaaatgcctcagcctaagacgtttggagaacttaaaaatttaccgttattaaatacagataaaccggttcaagctttgatgcgtattgcggatgaattaggagaaatctttaaattcgaggcgcctggtagcgtaacgcgctatttatcaagtcagcgtctaattaaagaagcatgcgatgaatcacgctttgataaaaacttaagtcaagggcttaaatttgcacgtgattttgttggagacgggctggttacaagctggacgcatgaaccgaattggaaaaaagcgcataatatcttagttccaagctttagtcagcgcgcaatggggcgttatcatgcgatgatggtcgatatcgccgtgcagcttgttcaaaagtgggggcgtctaaatgcagatgagcatattgaagtatcggaagacatgacacgtttaacgcttgatacaattggtctttgcctgtttaactatcgctttaacagcttttaccgagatacgcctcatccatttattgtgagtgtggttcgtgcactggatgaagtaatgaacaagctgcagcgagcaaatccagacgacccagcttatgatgaaaacaagcgccagtgtcaagaagatatcaaggtgatgaacgactatgtagataaaattattgcagatcgcaaaaacaggggtgaacaaagtcatgatttattaacccagatgctaaacggaaaagatccagaaacgggtgagccgcttgatgacgggaatattcgtcagcaaattattacattcttaattgcgggacaccaaacgacaagtggtcttttatcatttgcgctgtatttcttagtgaaaaatccacgtgtattacaaaaggtagcagaagaagcagcacgagttctagtagatcctgttccaagctacaaacaagtcaaacagcttaaatatgttggcatggtcttaaacgaagcgctgcgcttatggccagtagcgcctatgttttccctatatgcaaaagaagatacggtgcttggaggagaatatcctttaacgaaaggcgacgaagtaatggttctggtgcctcagcttcaccgtgataaaatcatttggggagacgatgtggaggagttccgtccagagcgttttgaaaatccaagtgcgattccgcagcatgcgtttaaaccgtttggaaacggtcagcgtgcgtgtatcggtcagcagttcgctcttcatagtgcaacgctggtacttggtatgatgctaaaacactttgactttgaagatcatacaaactacgagctcgtcattaaagaatcgcggacgttaaaacctgaaggctttgtggtaaaagcaaaatcgaaaggcattccgcttggcggtattccttcaccttcgactgaacagggtgctaaaaaagtacgcaaaaaggcagaaaacgctcataatacgccgctgcttgtgctatacggttcaaatgcgggaacagctgaaggaacggcgcgtgatttagcagatattgcaatgagcaaaggatttgcaccgcaggtcgcaacgcttgattcacacgccggtaatcttccgcgcgaaggagctgtattaattgtaacggcgtcttataacggtcatccgcctgataacgcaaagcaatttgtcgattggttagaccaagcgtctgcggatgaagtaaaaggcgttcgctactccgtatttggatgcggcgataaaaattgggcggggacgtatcaaaaagtgcctgcttttatcgatgaaacgcttgccgctaaaggggcagaaaacatcgctaagcgcggtgaagcagatgcaagcgacgactttgaaggcgcgtatgaagaatggcgtgatcatatgtggagtgacgtagcagcctactttggtctcgacattgaaaacagtgaagataataaatctactctttcacttcaatttgtcgacagcgcggcggatatgcctcttgcgaaaatgcacgatgcgttttcaacgaacgtcgtagcaagcaaagaacttcaacagcctggcagtgcacgaagcacgcgacatcttgaaattgaacttccaaaagaagcttcttatcaagaaggagatcatttaggtgttattcctcgctattatgaaggaatagtaaaccgtgtaacacagaggttcggcctaagcgcatcacagctgatccgtctggaagcagaagaagaaaaattagctcatttgccactcgctaaaacagtatccgtagaagagcttctgcaatacgtggagcttcaagatcctgttacgcgcacgcagcttcgcgcaatggctgctaaaacggtctgcccgccgcataaagtagagcttgaagccttgcttggcaagcaagcctataaagaacaggtgctggcaaaacgtttaacaatgcttgaactgcttgaaaaatacccggcgtgtgaaatgagtttcagcgaatttatcgcccttctgccaagcatacgcccgcgctattactcgatttcttcatcacctcgtgtcgatctgaaacaagcaagcatcacggtcagcgttgtcagcggaccggcgtggagcggatatggagaatataaaggaattgcgtcgaactatcttgctgagctgcaagaaggagatacgattacgtgctttatttccacaccgcagtcagagtttacgctgccaaaagaccctgaaacgccgcttatcatggtcggaccgggaacaggcgtcgcgccgtttagaggctttgtgcaggcgcgcaaacagctaaaagaacaaggacagtcacttggagaagcacatttatacttcggctgccgtgatcctcatgaagactatctgtatcaagaagagcttgaaaacgcccaaagcgaaggcatcattctgcttcataccgctttttctcgcatgccgaatcagccgaaaacatacgttcagcacgtaatggaacaagacggcaagaaattgattgaacttcttgatcaaggagcgcacttctatatttgcggagacggaattcaaatggcacctgccgttgaagcaacgcttatgaaaagctatgctgacgttcaccaagtgtcggaagcagacgctcgcttatggctgcagcagctagaagaaaaaggccgatacgcaaaagacgtgtggctgggg

SEQ ID NO: 1312 - protein, 1049 aa, synthetic construct
  REGION 1..1049: note = variant of P450 oxidase from Bacillus megaterium
MTIKEMPQPKTFGELKNLPLLNTDKPVQALMRIADELGEIFKFEAPGSVTRYLSSQRLIKEACDESRFDKNLSQGLKFARDFVGDGLVTSWTHEPNWKKAHNILVPSFSQRAMGRYHAMMVDIAVQLVQKWGRLNADEHIEVSEDMTRLTLDTIGLCLFNYRFNSFYRDTPHPFIVSVVRALDEVMNKLQRANPDDPAYDENKRQCQEDIKVMNDYVDKIIADRKNRGEQSHDLLTQMLNGKDPETGEPLDDGNIRQQIITFLIAGHQTTSGLLSFALYFLVKNPRVLQKVAEEAARVLVDPVPSYKQVKQLKYVGMVLNEALRLWPVAPMFSLYAKEDTVLGGEYPLTKGDEVMVLVPQLHRDKIIWGDDVEEFRPERFENPSAIPQHAFKPFGNGQRACIGQQFALHSATLVLGMMLKHFDFEDHTNYELVIKESRTLKPEGFVVKAKSKGIPLGGIPSPSTEQGAKKVRKKAENAHNTPLLVLYGSNAGTAEGTARDLADIAMSKGFAPQVATLDSHAGNLPREGAVLIVTASYNGHPPDNAKQFVDWLDQASADEVKGVRYSVFGCGDKNWAGTYQKVPAFIDETLAAKGAENIAKRGEADASDDFEGAYEEWRDHMWSDVAAYFGLDIENSEDNKSTLSLQFVDSAADMPLAKMHDAFSTNVVASKELQQPGSARSTRHLEIELPKEASYQEGDHLGVIPRYYEGIVNRVTQRFGLSASQLIRLEAEEEKLAHLPLAKTVSVEELLQYVELQDPVTRTQLRAMAAKTVCPPHKVELEALLGKQAYKEQVLAKRLTMLELLEKYPACEMSFSEFIALLPSIRPRYYSISSSPRVDLKQASITVSVVSGPAWSGYGEYKGIASNYLAELQEGDTITCFISTPQSEFTLPKDPETPLIMVGPGTGVAPFRGFVQARKQLKEQGQSLGEAHLYFGCRDPHEDYLYQEELENAQSEGIILLHTAFSRMPNQPKTYVQHVMEQDGKKLIELLDQGAHFYICGDGIQMAPAVEATLMKSYADVHQVSEADARLWLQQLEEKGRYAKDVWLG

SEQ ID NO: 1313 - DNA, 3147 bp, synthetic construct
  misc_feature 1..3147: note = variant of P450 oxidase from Bacillus megaterium
  source 1..3147: mol_type = other DNA
atgacaattaaggaaatgcctcagcctaagacgtttggagaacttaaaaatttaccgttattaaatacagataaaccggttcaagctttgatgcgtattgcggatgaattaggagaaatctttaaattcgaggcgcctggtagcgtaacgcgctatttatcaagtcagcgtctaattaaagaagcatgcgatgaatcacgctttgataaaaacttaagtcaagggcttaaatttgcacgtgattttgttggagacgggctggttacaagctggacgcatgaaccgaattggaaaaaagcgcataatatcttagttccaagctttagtcagcgcgcaatggggcgttatcatgcgatgatggtcgatatcgccgtgcagcttgttcaaaagtgggggcgtctaaatgcagatgagcatattgaagtatcggaagacatgacacgtttaacgcttgatacaattggtctttgcctgtttaactatcgctttaacagcttttaccgagatacgcctcatccatttattgtgagtgtggttcgtgcactggatgaagtaatgaacaagctgcagcgagcaaatccagacgacccagcttatgatgaaaacaagcgccagtgtcaagaagatatcaaggtgatgaacgactatgtagataaaattattgcagatcgcaaaaacaggggtgaacaaagtcatgatttattaacccagatgctaaacggaaaagatccagaaacgggtgagccgcttgatgacgggaatattcgtcagcaaattattacattcttaattgcgggacaccaaacgacaagtggtcttttatcatttgcgctgtatttcttagtgaaaaatccacgtgtattacaaaaggtagcagaagaagcagcacgagttctagtagatcctgttccaagctacaaacaagtcaaacagcttaaatatgttggcatggtcttaaacgaagcgctgcgcttatggccagtagcgcctatgttttccctatatgcaaaagaagatacggtgcttggaggagaatatcctttaacgaaaggcgacgaagtaatggttctggtgcctcagcttcaccgtgataaaatcatttggggagacgatgtggaggagttccgtccagagcgttttgaaaatccaagtgcgattccgcagcatgcgtttaaaccgtttggaaacggtcagcgtgcgtgtatcggtcagcagttcgctcttcatagtgcaacgctggtacttggtatgatgctaaaacactttgactttgaagatcatacaaactacgagctcgtcattaaagaatcgcggacgttaaaacctgaaggctttgtggtaaaagcaaaatcgaaaggcattccgcttggcggtattccttcaccttcgactgaacagggtgctaaaaaagtacgcaaaaaggcagaaaacgctcataatacgccgctgcttgtgctatacggttcaaatgcgggaacagctgaaggaacggcgcgtgatttagcagatattgcaatgagcaaaggatttgcaccgcaggtcgcaacgcttgattcacacgccggtaatcttccgcgcgaaggagctgtattaattgtaacggcgtcttataacggtcatccgcctgataacgcaaagcaatttgtcgattggttagaccaagcgtctgcggatgaagtaaaaggcgttcgctactccgtatttggatgcggcgataaaaattgggcggggacgtatcaaaaagtgcctgcttttatcgatgaaacgcttgccgctaaaggggcagaaaacatcgctaagcgcggtgaagcagatgcaagcgacgactttgaaggcgcgtatgaagaatggcgtgatcatatgtggagtgacgtagcagcctactttggtctcgacattgaaaacagtgaagataataaatctactctttcacttcaatttgtcgacagcgcggcggatatgcctcttgcgaaaatgcacgatgcgttttcaacgaacgtcgtagcaagcaaagaacttcaacagcctggcagtgcacgaagcacgcgacatcttgaaattgaacttccaaaagaagcttcttatcaagaaggagatcatttaggtgttattcctcgctattatgaaggaatagtaaaccgtgtaacacagaggttcggcctaagcgcatcacagctgatccgtctggaagcagaagaagaaaaattagctcatttgccactcgctaaaacagtatccgtagaagagcttctgcaatacgtggagcttcaagatcctgttacgcgcacgcagcttcgcgcaatggctgctaaaacggtctgcccgccgcataaagtagagcttgaagccttgcttggcaagcaagcctataaagaacaggtgctggcaaaacgtttaacaatgcttgaactgcttgaaaaatacccggcgtgtgaaatgagtttcagcgaatttatcgcccttctgccaagcatacgcccgcgctattactcgatttcttcatcacctcgtgtcgatctgaaacaagcaagcatcacggtcagcgttgtcagcggaccggcgtggagcggatatggagaatataaaggaattgcgtcgaactatcttgctgagctgcaagaaggagatacgattacgtgctttatttccacaccgcagtcagagtttacgctgccaaaagaccctgaaacgccgcttatcatggtcggaccgggaacaggcgtcgcgccgtttagaggctttgtgcaggcgcgcaaacagctaaaagtgcaaggacagtcacttggagaagcacatttatacttcggctgccgttcacctcatgaagactatctgtatcaagaagagcttgaaaacgcccaaagcgaaggcatcattctgcttcataccgctttttctcgcatgccgaatcagccgaaaacatacgttcagcacgtaatggaacaagacggcaagaaattgattgaacttcttgatcaaggagcgcacttctatatttgcggagacggaattcaaatggcacctgccgttgaagcaacgcttatgaaaagctatgctgacgttcaccaagtgtcggaagcagacgctcgcttatggctgcagcagctagaagaaaaaggccgatacgcaaaagacgtgtggctgggg

SEQ ID NO: 1314 - protein, 1049 aa, synthetic construct
  REGION 1..1049: note = variant of P450 oxidase from Bacillus megaterium
MTIKEMPQPKTFGELKNLPLLNTDKPVQALMRIADELGEIFKFEAPGSVTRYLSSQRLIKEACDESRFDKNLSQGLKFARDFVGDGLVTSWTHEPNWKKAHNILVPSFSQRAMGRYHAMMVDIAVQLVQKWGRLNADEHIEVSEDMTRLTLDTIGLCLFNYRFNSFYRDTPHPFIVSVVRALDEVMNKLQRANPDDPAYDENKRQCQEDIKVMNDYVDKIIADRKNRGEQSHDLLTQMLNGKDPETGEPLDDGNIRQQIITFLIAGHQTTSGLLSFALYFLVKNPRVLQKVAEEAARVLVDPVPSYKQVKQLKYVGMVLNEALRLWPVAPMFSLYAKEDTVLGGEYPLTKGDEVMVLVPQLHRDKIIWGDDVEEFRPERFENPSAIPQHAFKPFGNGQRACIGQQFALHSATLVLGMMLKHFDFEDHTNYELVIKESRTLKPEGFVVKAKSKGIPLGGIPSPSTEQGAKKVRKKAENAHNTPLLVLYGSNAGTAEGTARDLADIAMSKGFAPQVATLDSHAGNLPREGAVLIVTASYNGHPPDNAKQFVDWLDQASADEVKGVRYSVFGCGDKNWAGTYQKVPAFIDETLAAKGAENIAKRGEADASDDFEGAYEEWRDHMWSDVAAYFGLDIENSEDNKSTLSLQFVDSAADMPLAKMHDAFSTNVVASKELQQPGSARSTRHLEIELPKEASYQEGDHLGVIPRYYEGIVNRVTQRFGLSASQLIRLEAEEEKLAHLPLAKTVSVEELLQYVELQDPVTRTQLRAMAAKTVCPPHKVELEALLGKQAYKEQVLAKRLTMLELLEKYPACEMSFSEFIALLPSIRPRYYSISSSPRVDLKQASITVSVVSGPAWSGYGEYKGIASNYLAELQEGDTITCFISTPQSEFTLPKDPETPLIMVGPGTGVAPFRGFVQARKQLKVQGQSLGEAHLYFGCRSPHEDYLYQEELENAQSEGIILLHTAFSRMPNQPKTYVQHVMEQDGKKLIELLDQGAHFYICGDGIQMAPAVEATLMKSYADVHQVSEADARLWLQQLEEKGRYAKDVWLG

SEQ ID NO: 1315 - DNA, 3147 bp, synthetic construct
  misc_feature 1..3147: note = variant of P450 oxidase from Bacillus megaterium
  source 1..3147: mol_type = other DNA
atgacaattaaggaaatgcctcagcctaagacgtttggagaacttaaaaatttaccgttattaaatacagataaaccggttcaagctttgatgcgtattgcggatgaattaggagaaatctttaaattcgaggcgcctggtagcgtaacgcgctatttatcaagtcagcgtctaattaaagaagcatgcgatgaatcacgctttgataaaaacttaagtcaagggcttaaatttgcacgtgattttgttggagacgggctggttacaagctggacgcatgaaccgaattggaaaaaagcgcataatatcttagttccaagctttagtcagcgcgcaatggggcgttatcatgcgatgatggtcgatatcgccgtgcagcttgttcaaaagtgggggcgtctaaatgcagatgagcatattgaagtatcggaagacatgacacgtttaacgcttgatacaattggtctttgcctgtttaactatcgctttaacagcttttaccgagatacgcctcatccatttattgtgagtgtggttcgtgcactggatgaagtaatgaacaagctgcagcgagcaaatccagacgacccagcttatgatgaaaacaagcgccagtgtcaagaagatatcaaggtgatgaacgactatgtagataaaattattgcagatcgcaaaaacaggggtgaacaaagtcatgatttattaacccagatgctaaacggaaaagatccagaaacgggtgagccgcttgatgacgggaatattcgtcagcaaattattacattcttaattgcgggacaccaaacgacaagtggtcttttatcatttgcgctgtatttcttagtgaaaaatccacgtgtattacaaaaggtagcagaagaagcagcacgagttctagtagatcctgttccaagctacaaacaagtcaaacagcttaaatatgttggcatggtcttaaacgaagcgctgcgcttatggccagtagcgcctatgttttccctatatgcaaaagaagatacggtgcttggaggagaatatcctttaacgaaaggcgacgaagtaatggttctggtgcctcagcttcaccgtgataaaatcatttggggagacgatgtggaggagttccgtccagagcgttttgaaaatccaagtgcgattccgcagcatgcgtttaaaccgtttggaaacggtcagcgtgcgtgtatcggtcagcagttcgctcttcatagtgcaacgctggtacttggtatgatgctaaaacactttgactttgaagatcatacaaactacgagctcgtcattaaagaatcgcggacgttaaaacctgaaggctttgtggtaaaagcaaaatcgaaaggcattccgcttggcggtattccttcaccttcgactgaacagggtgctaaaaaagtacgcaaaaaggcagaaaacgctcataatacgccgctgcttgtgctatacggttcaaatgcgggaacagctgaaggaacggcgcgtgatttagcagatattgcaatgagcaaaggatttgcaccgcaggtcgcaacgcttgattcacacgccggtaatcttccgcgcgaaggagctgtattaattgtaacggcgtcttataacggtcatccgcctgataacgcaaagcaatttgtcgattggttagaccaagcgtctgcggatgaagtaaaaggcgttcgctactccgtatttggatgcggcgataaaaattgggcggggacgtatcaaaaagtgcctgcttttatcgatgaaacgcttgccgctaaaggggcagaaaacatcgctaagcgcggtgaagcagatgcaagcgacgactttgaaggcgcgtatgaagaatggcgtgatcatatgtggagtgacgtagcagcctactttggtctcgacattgaaaacagtgaagataataaatctactctttcacttcaatttgtcgacagcgcggcggatatgcctcttgcgaaaatgcacgatgcgttttcaacgaacgtcgtagcaagcaaagaacttcaacagcctggcagtgcacgaagcacgcgacatcttgaaattgaacttccaaaagaagcttcttatcaagaaggagatcatttaggtgttattcctcgctattatgaaggaatagtaaaccgtgtaacacagaggttcggcctaagcgcatcacagctgatccgtctggaagcagaagaagaaaaattagctcatttgccactcgctaaaacagtatccgtagaagagcttctgcaatacgtggagcttcaagatcctgttacgcgcacgcagcttcgcgcaatggctgctaaaacggtctgcccgccgcataaagtagagcttgaagccttgcttggcaagcaagcctataaaattcaggtgctggcaaaacgtttaacaatgcttgaactgcttgaaaaatacccggcgtgtgaaatgagtttcagcgaatttatcgcccttctgccaagcatacgcccgcgctattactcgatttcttcatcacctcgtgtcgatctgaaacaagcaagcatcacggtcagcgttgtcagcggaccggcgtggagcggatatggagaatataaaggaattgcgtcgaactatcttgctgagctgcaagaaggagatacgattacgtgctttatttccacaccgcagtcagagtttacgctgccaaaagaccctgaaacgccgcttatcatggtcggaccgggaacaggcgtcgcgccgtttagaggctttgtgcaggcgcgcaaacagctaaaagaacaaggacagtcacttggagaagcacatttatacttcggctgccgttcacctcatgaagactatctgtatcaagaagagcttgaaaacgcccaaagcgaaggcatcattctgcttcataccgctttttctcgcatgccgaatcagccgaaaacatacgttcagcacgtaatggaacaagacggcaagaaattgattgaacttcttgatcaaggagcgcacttctatatttgcggagacggaattcaaatggcacctgccgttgaagcaacgcttatgaaaagctatgctgacgttcaccaagtgtcggaagcagacgctcgcttatggctgcagcagctagaagaaaaaggccgatacgcaaaagacgtgtggctgggg

SEQ ID NO: 1316 - protein, 1049 aa, synthetic construct
  REGION 1..1049: note = variant of P450 oxidase from Bacillus megaterium
MTIKEMPQPKTFGELKNLPLLNTDKPVQALMRIADELGEIFKFEAPGSVTRYLSSQRLIKEACDESRFDKNLSQGLKFARDFVGDGLVTSWTHEPNWKKAHNILVPSFSQRAMGRYHAMMVDIAVQLVQKWGRLNADEHIEVSEDMTRLTLDTIGLCLFNYRFNSFYRDTPHPFIVSVVRALDEVMNKLQRANPDDPAYDENKRQCQEDIKVMNDYVDKIIADRKNRGEQSHDLLTQMLNGKDPETGEPLDDGNIRQQIITFLIAGHQTTSGLLSFALYFLVKNPRVLQKVAEEAARVLVDPVPSYKQVKQLKYVGMVLNEALRLWPVAPMFSLYAKEDTVLGGEYPLTKGDEVMVLVPQLHRDKIIWGDDVEEFRPERFENPSAIPQHAFKPFGNGQRACIGQQFALHSATLVLGMMLKHFDFEDHTNYELVIKESRTLKPEGFVVKAKSKGIPLGGIPSPSTEQGAKKVRKKAENAHNTPLLVLYGSNAGTAEGTARDLADIAMSKGFAPQVATLDSHAGNLPREGAVLIVTASYNGHPPDNAKQFVDWLDQASADEVKGVRYSVFGCGDKNWAGTYQKVPAFIDETLAAKGAENIAKRGEADASDDFEGAYEEWRDHMWSDVAAYFGLDIENSEDNKSTLSLQFVDSAADMPLAKMHDAFSTNVVASKELQQPGSARSTRHLEIELPKEASYQEGDHLGVIPRYYEGIVNRVTQRFGLSASQLIRLEAEEEKLAHLPLAKTVSVEELLQYVELQDPVTRTQLRAMAAKTVCPPHKVELEALLGKQAYKIQVLAKRLTMLELLEKYPACEMSFSEFIALLPSIRPRYYSISSSPRVDLKQASITVSVVSGPAWSGYGEYKGIASNYLAELQEGDTITCFISTPQSEFTLPKDPETPLIMVGPGTGVAPFRGFVQARKQLKEQGQSLGEAHLYFGCRSPHEDYLYQEELENAQSEGIILLHTAFSRMPNQPKTYVQHVMEQDGKKLIELLDQGAHFYICGDGIQMAPAVEATLMKSYADVHQVSEADARLWLQQLEEKGRYAKDVWLG

SEQ ID NO: 1317 - DNA, 3147 bp, synthetic construct
  misc_feature 1..3147: note = variant of P450 oxidase from Bacillus megaterium
  source 1..3147: mol_type = other DNA
atgacaattaaggaaatgcctcagcctaagacgtttggagaacttaaaaatttaccgttattaaatacagataaaccggttcaagctttgatgcgtattgcggatgaattaggagaaatctttaaattcgaggcgcctggtagcgtaacgcgctatttatcaagtcagcgtctaattaaagaagcatgcgatgaatcacgctttgataaaaacttaagtcaagggcttaaatttgcacgtgattttgttggagacgggctggttacaagctggacgcatgaaccgaattggaaaaaagcgcataatatcttagttccaagctttagtcagcgcgcaatggggcgttatcatgcgatgatggtcgatatcgccgtgcagcttgttcaaaagtgggggcgtctaaatgcagatgagcatattgaagtatcggaagacatgacacgtttaacgcttgatacaattggtctttgcctgtttaactatcgctttaacagcttttaccgagatacgcctcatccatttattgtgagtgtggttcgtgcactggatgaagtaatgaacaagctgcagcgagcaaatccagacgacccagcttatgatgaaaacaagcgccagtgtcaagaagatatcaaggtgatgaacgactatgtagataaaattattgcagatcgcaaaaacaggggtgaacaaagtcatgatttattaacccagatgctaaacggaaaagatccagaaacgggtgagccgcttgatgacgggaatattcgtcagcaaattattacattcttaattgcgggacaccaaacgacaagtggtcttttatcatttgcgctgtatttcttagtgaaaaatccacgtgtattacaaaaggtagcagaagaagcagcacgagttctagtagatcctgttccaagctacaaacaagtcaaacagcttaaatatgttggcatggtcttaaacgaagcgctgcgcttatggccagtagcgcctatgttttccctatatgcaaaagaagatacggtgcttggaggagaatatcctttaacgaaaggcgacgaagtaatggttctggtgcctcagcttcaccgtgataaaatcatttggggagacgatgtggaggagttccgtccagagcgttttgaaaatccaagtgcgattccgcagcatgcgtttaaaccgtttggaaacggtcagcgtgcgtgtatcggtcagcagttcgctcttcatagtgcaacgctggtacttggtatgatgctaaaacactttgactttgaagatcatacaaactacgagctcgtcattaaagaatcgcggacgttaaaacctgaaggctttgtggtaaaagcaaaatcgaaaggcattccgcttggcggtattccttcaccttcgactgaacagggtgctaaaaaagtacgcaaaaaggcagaaaacgctcataatacgccgctgcttgtgctatacggttcaaatgcgggaacagctgaaggaacggcgcgtgatttagcagatattgcaatgagcaaaggatttgcaccgcaggtcgcaacgcttgattcacacgccggtaatcttccgcgcgaaggagctgtattaattgtaacggcgtcttataacggtcatccgcctgataacgcaaagcaatttgtcgattggttagaccaagcgtctgcggatgaagtaaaaggcgttcgctactccgtatttggatgcggcgataaaaattgggcggggacgtatcaaaaagtgcctgcttttatcgatgaaacgcttgccgctaaaggggcagaaaacatcgctaagcgcggtgaagcagatgcaagcgacgactttgaaggcgcgtatgaagaatggcgtgatcatatgtggagtgacgtagcagcctactttggtctcgacattgaaaacagtgaagataataaatctactctttcacttcaatttgtcgacagcgcggcggatatgcctcttgcgaaaatgcacgatgcgttttcaacgaacgtcgtagcaagcaaagaacttcaacagcctggcagtgcacgaagcacgcgacatcttgaaattgaacttccaaaagaagcttcttatcaagaaggagatcatttaggtgttattcctcgctattatgaaggaatagtaaaccgtgtaacacagaggttcggcctaagcgcatcacagctgatccgtctggaagcagaagaagaaaaattagctcatttgccactcgctaaaacagtatccgtagaagagcttctgcaatacgtggagcttcaagatcctgttacgcgcacgcagcttcgcgcaatggctgctaaaacggtctgcccgccgcataaagtagagcttgaagccttgcttggcaagcaagcctataaagaacaggtgctggcaaaacgtttaacaatgcttgaactgcttgaaaaatacccggcgtgtgaaatgagtttcagcgaatttatcgcccttctgccaagcatacgcccgcgctattactcgatttcttcatcacctcgtgtcgatctgaaacaagcaagcatcacggtcagcgttgtcagcggaccggcgtggagcggatatggagaatataaaggaattgcgtcgaactatcttgctgagctgcaagaaggagatacgattacgtgctttatttccacaccgcagtcagagtttacgctgccaaaagaccctgaaacgccgcttatcatggtcggaccgggaacaggcgtcgcgccgtttagaggctttgtgcaggcgcgcaaacagctaaaagaacaaggacagtcacttggagaagcacatttatacttcggctgccgttcacctcatgaagactatctgtatcaagaagagcttgaaaacgcccaaagcgaaggcatcattctgcttcataccgctttttctcgcatgccgaatcagccgaaaacatacgttcagcacgtaatggaacaagacggcaagaaattgattgaacttcttgatcaaggagcgcacttctatatttgcggagacggaattcaaatggcacctgccgttgaagcaacgcttttgaaaagctatgctgacgttcaccaagtgtcggaagcagacgctcgcttatggctgcagcagctagaagaaaaaggccgatacgcaaaagacgtgtggctgggg

SEQ ID NO: 1318 - protein, 1049 aa, synthetic construct
  REGION 1..1049: note = variant of P450 oxidase from Bacillus megaterium
MTIKEMPQPKTFGELKNLPLLNTDKPVQALMRIADELGEIFKFEAPGSVTRYLSSQRLIKEACDESRFDKNLSQGLKFARDFVGDGLVTSWTHEPNWKKAHNILVPSFSQRAMGRYHAMMVDIAVQLVQKWGRLNADEHIEVSEDMTRLTLDTIGLCLFNYRFNSFYRDTPHPFIVSVVRALDEVMNKLQRANPDDPAYDENKRQCQEDIKVMNDYVDKIIADRKNRGEQSHDLLTQMLNGKDPETGEPLDDGNIRQQIITFLIAGHQTTSGLLSFALYFLVKNPRVLQKVAEEAARVLVDPVPSYKQVKQLKYVGMVLNEALRLWPVAPMFSLYAKEDTVLGGEYPLTKGDEVMVLVPQLHRDKIIWGDDVEEFRPERFENPSAIPQHAFKPFGNGQRACIGQQFALHSATLVLGMMLKHFDFEDHTNYELVIKESRTLKPEGFVVKAKSKGIPLGGIPSPSTEQGAKKVRKKAENAHNTPLLVLYGSNAGTAEGTARDLADIAMSKGFAPQVATLDSHAGNLPREGAVLIVTASYNGHPPDNAKQFVDWLDQASADEVKGVRYSVFGCGDKNWAGTYQKVPAFIDETLAAKGAENIAKRGEADASDDFEGAYEEWRDHMWSDVAAYFGLDIENSEDNKSTLSLQFVDSAADMPLAKMHDAFSTNVVASKELQQPGSARSTRHLEIELPKEASYQEGDHLGVIPRYYEGIVNRVTQRFGLSASQLIRLEAEEEKLAHLPLAKTVSVEELLQYVELQDPVTRTQLRAMAAKTVCPPHKVELEALLGKQAYKEQVLAKRLTMLELLEKYPACEMSFSEFIALLPSIRPRYYSISSSPRVDLKQASITVSVVSGPAWSGYGEYKGIASNYLAELQEGDTITCFISTPQSEFTLPKDPETPLIMVGPGTGVAPFRGFVQARKQLKEQGQSLGEAHLYFGCRSPHEDYLYQEELENAQSEGIILLHTAFSRMPNQPKTYVQHVMEQDGKKLIELLDQGAHFYICGDGIQMAPAVEATLLKSYADVHQVSEADARLWLQQLEEKGRYAKDVWLG

SEQ ID NO: 1319 - DNA, 3147 bp, synthetic construct
  misc_feature 1..3147: note = variant of P450 oxidase from Bacillus megaterium
  source 1..3147: mol_type = other DNA
atgacaattaaggaaatgcctcagcctaagacgtttggagaacttaaaaatttaccgttattaaatacagataaaccggttcaagctttgatgcgtattgcggatgaattaggagaaatctttaaattcgaggcgcctggtagcgtaacgcgctatttatcaagtcagcgtctaattaaagaagcatgcgatgaatcacgctttgataaaaacttaagtcaagggcttaaatttgcacgtgattttgttggagacgggctggttacaagctggacgcatgaaccgaattggaaaaaagcgcataatatcttagttccaagctttagtcagcgcgcaatggggcgttatcatgcgatgatggtcgatatcgccgtgcagcttgttcaaaagtgggggcgtctaaatgcagatgagcatattgaagtatcggaagacatgacacgtttaacgcttgatacaattggtctttgcctgtttaactatcgctttaacagcttttaccgagatacgcctcatccatttattgtgagtgtggttcgtgcactggatgaagtaatgaacaagctgcagcgagcaaatccagacgacccagcttatgatgaaaacaagcgccagtgtcaagaagatatcaaggtgatgaacgactatgtagataaaattattgcagatcgcaaaaacaggggtgaacaaagtcatgatttattaacccagatgctaaacggaaaagatccagaaacgggtgagccgcttgatgacgggaatattcgtcagcaaattattacattcttaattgcgggacaccaaacgacaagtggtcttttatcatttgcgctgtatttcttagtgaaaaatccacgtgtattacaaaaggtagcagaagaagcagcacgagttctagtagatcctgttccaagctacaaacaagtcaaacagcttaaatatgttggcatggtcttaaacgaagcgctgcgcttatggccagtagcgcctatgttttccctatatgcaaaagaagatacggtgcttggaggagaatatcctttaacgaaaggcgacgaagtaatggttctggtgcctcagcttcaccgtgataaaatcatttggggagacgatgtggaggagttccgtccagagcgttttgaaaatccaagtgcgattccgcagcatgcgtttaaaccgtttggaaacggtcagcgtgcgtgtatcggtcagcagttcgctcttcatagtgcaacgctggtacttggtatgatgctaaaacactttgactttgaagatcatacaaactacgagctcgtcattaaagaatcgcggacgttaaaacctgaaggctttgtggtaaaagcaaaatcgaaaggcattccgcttggcggtattccttcaccttcgactgaacagggtgctaaaaaagtacgcaaaaaggcagaaaacgctcataatacgccgctgcttgtgctatacggttcaaatgcgggaacagctgaaggaacggcgcgtgatttagcagatattgcaatgagcaaaggatttgcaccgcaggtcgcaacgcttgattcacacgccggtaatcttccgcgcgaaggagctgtattaattgtaacggcgtcttataacggtcatccgcctgataacgcaaagcaatttgtcgattggttagaccaagcgtctgcggatgaagtaaaaggcgttcgctactccgtatttggatgcggcgataaaaattgggcggggacgtatcaaaaagtgcctgcttttatcgatgaaacgcttgccgctaaaggggcagaaaacatcgctaagcgcggtgaagcagatgcaagcgacgactttgaaggcgcgtatgaagaatggcgtgatcatatgtggagtgacgtagcagcctactttggtctcgacattgaaaacagtgaagataataaatctactctttcacttcaatttgtcgacagcgcggcggatatgcctcttgcgaaaatgcacgatgcgttttcaacgaacgtcgtagcaagcaaagaacttcaacagcctggcagtgcacgaagcacgcgacatcttgaaattgaacttccaaaagaagcttcttatcaagaaggagatcatttaggtgttattcctcgctattatgaaggaatagtaaaccgtgtaacacagaggttcggcctaagcgcatcacagctgatccgtctggaagcagaagaagaaaaattagctcatttgccactcgctaaaacagtatccgtagaagagcttctgcaatacgtggagcttcaagatcctgttacgcgcacgcagcttcgcgcaatggctgctaaaacggtctgcccgccgcataaagtagagcttgaagccttgcttggcaagcaagcctataaagaacaggtgctggcaaaacgtttaacaatgcttgaactgcttgaaaaatacccggcgtgtgaaatgagtttcagcgaatttatcgcccttctgccaggtatacgcccgcgctattactcgatttcttcatcacctcgtgtcgatctgaaacaagcaagcatcacggtcagcgttgtcagcggaccggcgtggagcggatatggagaatataaaggaattgcgtcgaactatcttgctgagctgcaagaaggagatacgattacgtgctttatttccacaccgcagtcagagtttacgctgccaaaagaccctgaaacgccgcttatcatggtcggaccgggaacaggcgtcgcgccgtttagaggctttgtgcaggcgcgcaaacagctaaaagaacaaggacagtcacttggagaagcacatttatacttcggctgccgttcacctcatgaagactatctgtatcaagaagagcttgaaaacgcccaaagcgaaggcatcattctgcttcataccgctttttctcgcatgccgaatcagccgaaaacatacgttcagcacgtaatggaacaagacggcaagaaattgattgaacttcttgatcaaggagcgcacttctatatttgcggagacggaattcaaatggcacctgccgttgaagcaacgcttatgaaaagctatgctgacgttcaccaagtgtcggaagcagacgctcgcttatggctgcagcagctagaagaaaaaggccgatacgcaaaagacgtgtggctgggg

SEQ ID NO: 1320 - protein, 1049 aa, synthetic construct
  REGION 1..1049: note = variant of P450 oxidase from Bacillus megaterium
MTIKEMPQPKTFGELKNLPLLNTDKPVQALMRIADELGEIFKFEAPGSVTRYLSSQRLIKEACDESRFDKNLSQGLKFARDFVGDGLVTSWTHEPNWKKAHNILVPSFSQRAMGRYHAMMVDIAVQLVQKWGRLNADEHIEVSEDMTRLTLDTIGLCLFNYRFNSFYRDTPHPFIVSVVRALDEVMNKLQRANPDDPAYDENKRQCQEDIKVMNDYVDKIIADRKNRGEQSHDLLTQMLNGKDPETGEPLDDGNIRQQIITFLIAGHQTTSGLLSFALYFLVKNPRVLQKVAEEAARVLVDPVPSYKQVKQLKYVGMVLNEALRLWPVAPMFSLYAKEDTVLGGEYPLTKGDEVMVLVPQLHRDKIIWGDDVEEFRPERFENPSAIPQHAFKPFGNGQRACIGQQFALHSATLVLGMMLKHFDFEDHTNYELVIKESRTLKPEGFVVKAKSKGIPLGGIPSPSTEQGAKKVRKKAENAHNTPLLVLYGSNAGTAEGTARDLADIAMSKGFAPQVATLDSHAGNLPREGAVLIVTASYNGHPPDNAKQFVDWLDQASADEVKGVRYSVFGCGDKNWAGTYQKVPAFIDETLAAKGAENIAKRGEADASDDFEGAYEEWRDHMWSDVAAYFGLDIENSEDNKSTLSLQFVDSAADMPLAKMHDAFSTNVVASKELQQPGSARSTRHLEIELPKEASYQEGDHLGVIPRYYEGIVNRVTQRFGLSASQLIRLEAEEEKLAHLPLAKTVSVEELLQYVELQDPVTRTQLRAMAAKTVCPPHKVELEALLGKQAYKEQVLAKRLTMLELLEKYPACEMSFSEFIALLPGIRPRYYSISSSPRVDLKQASITVSVVSGPAWSGYGEYKGIASNYLAELQEGDTITCFISTPQSEFTLPKDPETPLIMVGPGTGVAPFRGFVQARKQLKEQGQSLGEAHLYFGCRSPHEDYLYQEELENAQSEGIILLHTAFSRMPNQPKTYVQHVMEQDGKKLIELLDQGAHFYICGDGIQMAPAVEATLMKSYADVHQVSEADARLWLQQLEEKGRYAKDVWLG

SEQ ID NO: 1321 - DNA, 3147 bp, synthetic construct
  misc_feature 1..3147: note = variant of P450 oxidase from Bacillus megaterium
  source 1..3147: mol_type = other DNA
atgacaattaaggaaatgcctcagcctaagacgtttggagaacttaaaaatttaccgttattaaatacagataaaccggttcaagctttgatgcgtattgcggatgaattaggagaaatctttaaattcgaggcgcctggtagcgtaacgcgctatttatcaagtcagcgtctaattaaagaagcatgcgatgaatcacgctttgataaaaacttaagtcaagggcttaaatttgcacgtgattttgttggagacgggctggttacaagctggacgcatgaaccgaattggaaaaaagcgcataatatcttagttccaagctttagtcagcgcgcaatggggcgttatcatgcgatgatggtcgatatcgccgtgcagcttgttcaaaagtgggggcgtctaaatgcagatgagcatattgaagtatcggaagacatgacacgtttaacgcttgatacaattggtctttgcctgtttaactatcgctttaacagcttttaccgagatacgcctcatccatttattgtgagtgtggttcgtgcactggatgaagtaatgaacaagctgcagcgagcaaatccagacgacccagcttatgatgaaaacaagcgccagtgtcaagaagatatcaaggtgatgaacgactatgtagataaaattattgcagatcgcaaaaacaggggtgaacaaagtcatgatttattaacccagatgctaaacggaaaagatccagaaacgggtgagccgcttgatgacgggaatattcgtcagcaaattattacattcttaattgcgggacaccaaacgacaagtggtcttttatcatttgcgctgtatttcttagtgaaaaatccacgtgtattacaaaaggtagcagaagaagcagcacgagttctagtagatcctgttccaagctacaaacaagtcaaacagcttaaatatgttggcatggtcttaaacgaagcgctgcgcttatggccagtagcgcctatgttttccctatatgcaaaagaagatacggtgcttggaggagaatatcctttaacgaaaggcgacgaagtaatggttctggtgcctcagcttcaccgtgataaaatcatttggggagacgatgtggaggagttccgtccagagcgttttgaaaatccaagtgcgattccgcagcatgcgtttaaaccgtttggaaacggtcagcgtgcgtgtatcggtcagcagttcgctcttcatagtgcaacgctggtacttggtatgatgctaaaacactttgactttgaagatcatacaaactacgagctcgtcattaaagaatcgcggacgttaaaacctgaaggctttgtggtaaaagcaaaatcgaaaggcattccgcttggcggtattccttcaccttcgactgaacagggtgctaaaaaagtacgcaaaaaggcagaaaacgctcataatacgccgctgcttgtgctatacggttcaaatgcgggaacagctgaaggaacggcgcgtgatttagcagatattgcaatgagcaaaggatttgcaccgcaggtcgcaacgcttgattcacacgccggtaatcttccgcgcgaaggagctgtattaattgtaacggcgtcttataacggtcatccgcctgataacgcaaagcaatttgtcgattggttagaccaagcgtctgcggatgaagtaaaaggcgttcgctactccgtatttggatgcggcgataaaaattgggcggggacgtatcaaaaagtgcctgcttttatcgatgaaacgcttgccgctaaaggggcagaaaacatcgctaagcgcggtgaagcagatgcaagcgacgactttgaaggcgcgtatgaagaatggcgtgatcatatgtggagtgacgtagcagcctactttggtctcgacattgaaaacagtgaagataataaatctactctttcacttcaatttgtcgacagcgcggcggatatgcctcttgcgaaaatgcacgatgcgttttcaacgaacgtcgtagcaagcaaagaacttcaacagcctggcagtgcacgaagcacgcgacatcttgaaattgaacttccaaaagaagcttcttatcaagaaggagatcatttaggtgttattcctcgctattatgaaggaatagtaaaccgtgtaacacagaggttcggcctaagcgcatcacagctgatccgtctggaagcagaagaagaaaaattagctcatttgccactcgctaaaacagtatccgtagaagagcttctgcaatacgtggagcttcaagatcctgttacgcgcacgcagcttcgcgcaatggctgctaaaacggtctgcccgccgcataaagtagagcttgaagccttgcttggcaagcaagcctataaagaacaggtgctggcaaaacgtttaacaatgcttgaactgcttgaaaaatacccggcgtgtgaaatgagtttcagcgaatttatcgcccttctgccaagcatacgcccgcgctattactcgatttcttcatcacctcgtgtcgatctgaaacaagcaagcatcacggtcagcgttgtcagcggaccggcgtggagcggatatggagaatataaaggaattgcgtcgaactatcttgctgagctgcaagaaggagatacgattacgtgctttatttccacaccgcagtcagagtttacgctgccaaaagaccctgaaacgccgcttatcatggtcggaccgggaacaggcgtcgcgccgtttagaggctttgtgcaggcgcgcaaacagctaaaagaacaaggacagtcacttggagaagcacatttatacttcggctgccgttcacctcatgaagactatctgtatcaagaagagcttgaaaacgcccaaagcgaaggcatcattctgcttcataccgctttttctcgcatgccgaatcagccgaaagtgtacgttcagcacgtaatggaacaagacggcaagaaattgattgaacttcttgatcaaggagcgcacttctatatttgcggagacggaattcaaatggcacctgccgttgaagcaacgcttatgaaaagctatgctgacgttcaccaagtgtcggaagcagacgctcgcttatggctgcagcagctagaagaaaaaggccgatacgcaaaagacgtgtggctgggg

SEQ ID NO: 1322 - protein, 1049 aa, synthetic construct
  REGION 1..1049: note = variant of P450 oxidase from Bacillus megaterium
MTIKEMPQPKTFGELKNLPLLNTDKPVQALMRIADELGEIFKFEAPGSVTRYLSSQRLIKEACDESRFDKNLSQGLKFARDFVGDGLVTSWTHEPNWKKAHNILVPSFSQRAMGRYHAMMVDIAVQLVQKWGRLNADEHIEVSEDMTRLTLDTIGLCLFNYRFNSFYRDTPHPFIVSVVRALDEVMNKLQRANPDDPAYDENKRQCQEDIKVMNDYVDKIIADRKNRGEQSHDLLTQMLNGKDPETGEPLDDGNIRQQIITFLIAGHQTTSGLLSFALYFLVKNPRVLQKVAEEAARVLVDPVPSYKQVKQLKYVGMVLNEALRLWPVAPMFSLYAKEDTVLGGEYPLTKGDEVMVLVPQLHRDKIIWGDDVEEFRPERFENPSAIPQHAFKPFGNGQRACIGQQFALHSATLVLGMMLKHFDFEDHTNYELVIKESRTLKPEGFVVKAKSKGIPLGGIPSPSTEQGAKKVRKKAENAHNTPLLVLYGSNAGTAEGTARDLADIAMSKGFAPQVATLDSHAGNLPREGAVLIVTASYNGHPPDNAKQFVDWLDQASADEVKGVRYSVFGCGDKNWAGTYQKVPAFIDETLAAKGAENIAKRGEADASDDFEGAYEEWRDHMWSDVAAYFGLDIENSEDNKSTLSLQFVDSAADMPLAKMHDAFSTNVVASKELQQPGSARSTRHLEIELPKEASYQEGDHLGVIPRYYEGIVNRVTQRFGLSASQLIRLEAEEEKLAHLPLAKTVSVEELLQYVELQDPVTRTQLRAMAAKTVCPPHKVELEALLGKQAYKEQVLAKRLTMLELLEKYPACEMSFSEFIALLPSIRPRYYSISSSPRVDLKQASITVSVVSGPAWSGYGEYKGIASNYLAELQEGDTITCFISTPQSEFTLPKDPETPLIMVGPGTGVAPFRGFVQARKQLKEQGQSLGEAHLYFGCRSPHEDYLYQEELENAQSEGIILLHTAFSRMPNQPKVYVQHVMEQDGKKLIELLDQGAHFYICGDGIQMAPAVEATLMKSYADVHQVSEADARLWLQQLEEKGRYAKDVWLG

SEQ ID NO: 1323 - DNA, 3147 bp, synthetic construct
  misc_feature 1..3147: note = variant of P450 oxidase from Bacillus megaterium
  source 1..3147: mol_type = other DNA
atgacaattaaggaaatgcctcagcctaagacgtttggagaacttaaaaatttaccgttattaaatacagataaaccggttcaagctttgatgcgtattgcggatgaattaggagaaatctttaaattcgaggcgcctggtagcgtaacgcgctatttatcaagtcagcgtctaattaaagaagcatgcgatgaatcacgctttgataaaaacttaagtcaagggcttaaatttgcacgtgattttgttggagacgggctggttacaagctggacgcatgaaccgaattggaaaaaagcgcataatatcttagttccaagctttagtcagcgcgcaatggggcgttatcatgcgatgatggtcgatatcgccgtgcagcttgttcaaaagtgggggcgtctaaatgcagatgagcatattgaagtatcggaagacatgacacgtttaacgcttgatacaattggtctttgcctgtttaactatcgctttaacagcttttaccgagatacgcctcatccatttattgtgagtgtggttcgtgcactggatgaagtaatgaacaagctgcagcgagcaaatccagacgacccagcttatgatgaaaacaagcgccagtgtcaagaagatatcaaggtgatgaacgactatgtagataaaattattgcagatcgcaaaaacaggggtgaacaaagtcatgatttattaacccagatgctaaacggaaaagatccagaaacgggtgagccgcttgatgacgggaatattcgtcagcaaattattacattcttaattgcgggacaccaaacgacaagtggtcttttatcatttgcgctgtatttcttagtgaaaaatccacgtgtattacaaaaggtagcagaagaagcagcacgagttctagtagatcctgttccaagctacaaacaagtcaaacagcttaaatatgttggcatggtcttaaacgaagcgctgcgcttatggccagtagcgcctatgttttccctatatgcaaaagaagatacggtgcttggaggagaatatcctttaacgaaaggcgacgaagtaatggttctggtgcctcagcttcaccgtgataaaatcatttggggagacgatgtggaggagttccgtccagagcgttttgaaaatccaagtgcgattccgcagcatgcgtttaaaccgtttggaaacggtcagcgtgcgtgtatcggtcagcagttcgctcttcatagtgcaacgctggtacttggtatgatgctaaaacactttgactttgaagatcatacaaactacgagctcgtcattaaagaatcgcggacgttaaaacctgaaggctttgtggtaaaagcaaaatcgaaaggcattccgcttggcggtattccttcaccttcgactgaacagggtgctaaaaaagtacgcaaaaaggcagaaaacgctcataatacgccgctgcttgtgctatacggttcaaatgcgggaacagctgaaggaacggcgcgtgatttagcagatattgcaatgagcaaaggatttgcaccgcaggtcgcaacgcttgattcacacgccggtaatcttccgcgcgaaggagctgtattaattgtaacggcgtcttataacggtcatccgcctgataacgcaaagcaatttgtcgattggttagaccaagcgtctgcggatgaagtaaaaggcgttcgctactccgtatttggatgcggcgataaaaattgggcggggacgtatcaaaaagtgcctgcttttatcgatgaaacgcttgccgctaaaggggcagaaaacatcgctaagcgcggtgaagcagatgcaagcgacgactttgaaggcgcgtatgaagaatggcgtgatcatatgtggagtgacgtagcagcctactttggtctcgacattgaaaacagtgaagataataaatctactctttcacttcaatttgtcgacagcgcggcggatatgcctcttgcgaaaatgcacgatgcgttttcaacgaacgtcgtagcaagcaaagaacttcaacagcctggcagtgcacgaagcacgcgacatcttgaaattgaacttccaaaagaagcttcttatcaagaaggagatcatttaggtgttattcctcgctattatgaaggaatagtaaaccgtgtaacacagaggttcggcctaagcgcatcacagctgatccgtctggaagcagaagaagaaaaattagctcatttgccactcgctaaaacagtatccgtagaagagcttctgcaatacgtggagcttcaagatcctgttacgcgcacgcagcttcgcgcaatggctgctaaaacggtctgcccgccgcataaagtagagcttgaagccttgcttggcaagcaagcctataaagaacaggtgctggcaaaacgtttaacaatgcttgaactgcttgaaaaatacccggcgtgtgaaatgagtttcagcgaatttatcgcccttctgccaagcatacgcccgcgctattactcgatttcttcatcacctcgtgtcgatctgaaacaagcaagcatcacggtcagcgttgtcagcggaccggcgtggagcggatatggagaatataaaggaattgcgtcgaactatcttgctgagctgcaagaaggagatacgattacgtgctttatttccacaccgcagtcagagtttacgctgccaaaagaccctgaaacgccgcttatcatggtcggaccgggaacaggcgtcgcgccgtttagaggctttgtgcaggcgcgcaaacagctaaaagaacaaggacagtcacttggagaagcacatttatacttcggctgccgttcacctcatgaagactatctgtatcaagaagagcttgaaaacgcccaaagcgaaggcatcattctgcttcataccgctttttctcgcatgccgaatcagccgaaaacatacgttcagcacgtaatggaacaagacggcaagaaattgattgaacttcttgatcaaggagcgcacttctatatttgcggagacggaattcaaatggcacctgccgttgaagcaacgcttatgaaagcgtatgctgacgttcaccaagtgtcggaagcagacgctcgcttatggctgcagcagctagaagaaaaaggccgatacgcaaaagacgtgtggctgggg

SEQ ID NO: 1324 - protein, 1049 aa, synthetic construct
  REGION 1..1049: note = variant of P450 oxidase from Bacillus megaterium
MTIKEMPQPKTFGELKNLPLLNTDKPVQALMRIADELGEIFKFEAPGSVTRYLSSQRLIKEACDESRFDKNLSQGLKFARDFVGDGLVTSWTHEPNWKKAHNILVPSFSQRAMGRYHAMMVDIAVQLVQKWGRLNADEHIEVSEDMTRLTLDTIGLCLFNYRFNSFYRDTPHPFIVSVVRALDEVMNKLQRANPDDPAYDENKRQCQEDIKVMNDYVDKIIADRKNRGEQSHDLLTQMLNGKDPETGEPLDDGNIRQQIITFLIAGHQTTSGLLSFALYFLVKNPRVLQKVAEEAARVLVDPVPSYKQVKQLKYVGMVLNEALRLWPVAPMFSLYAKEDTVLGGEYPLTKGDEVMVLVPQLHRDKIIWGDDVEEFRPERFENPSAIPQHAFKPFGNGQRACIGQQFALHSATLVLGMMLKHFDFEDHTNYELVIKESRTLKPEGFVVKAKSKGIPLGGIPSPSTEQGAKKVRKKAENAHNTPLLVLYGSNAGTAEGTARDLADIAMSKGFAPQVATLDSHAGNLPREGAVLIVTASYNGHPPDNAKQFVDWLDQASADEVKGVRYSVFGCGDKNWAGTYQKVPAFIDETLAAKGAENIAKRGEADASDDFEGAYEEWRDHMWSDVAAYFGLDIENSEDNKSTLSLQFVDSAADMPLAKMHDAFSTNVVASKELQQPGSARSTRHLEIELPKEASYQEGDHLGVIPRYYEGIVNRVTQRFGLSASQLIRLEAEEEKLAHLPLAKTVSVEELLQYVELQDPVTRTQLRAMAAKTVCPPHKVELEALLGKQAYKEQVLAKRLTMLELLEKYPACEMSFSEFIALLPSIRPRYYSISSSPRVDLKQASITVSVVSGPAWSGYGEYKGIASNYLAELQEGDTITCFISTPQSEFTLPKDPETPLIMVGPGTGVAPFRGFVQARKQLKEQGQSLGEAHLYFGCRSPHEDYLYQEELENAQSEGIILLHTAFSRMPNQPKTYVQHVMEQDGKKLIELLDQGAHFYICGDGIQMAPAVEATLMKAYADVHQVSEADARLWLQQLEEKGRYAKDVWLG

SEQ ID NO: 1325 - DNA, 3147 bp, synthetic construct
  misc_feature 1..3147: note = variant of P450 oxidase from Bacillus megaterium
  source 1..3147: mol_type = other DNA
atgacaattaaggaaatgcctcagcctaagacgtttggagaacttaaaaatttaccgttattaaatacagataaaccggttcaagctttgatgcgtattgcggatgaattaggagaaatctttaaattcgaggcgcctggtagcgtaacgcgctatttatcaagtcagcgtctaattaaagaagcatgcgatgaatcacgctttgataaaaacttaagtcaagggcttaaatttgcacgtgattttgttggagacgggctggttacaagctggacgcatgaaccgaattggaaaaaagcgcataatatcttagttccaagctttagtcagcgcgcaatggggcgttatcatgcgatgatggtcgatatcgccgtgcagcttgttcaaaagtgggggcgtctaaatgcagatgagcatattgaagtatcggaagacatgacacgtttaacgcttgatacaattggtctttgcctgtttaactatcgctttaacagcttttaccgagatacgcctcatccatttattgtgagtgtggttcgtgcactggatgaagtaatgaacaagctgcagcgagcaaatccagacgacccagcttatgatgaaaacaagcgccagtgtcaagaagatatcaaggtgatgaacgactatgtagataaaattattgcagatcgcaaaaacaggggtgaacaaagtcatgatttattaacccagatgctaaacggaaaagatccagaaacgggtgagccgcttgatgacgggaatattcgtcagcaaattattacattcttaattgcgggacaccaaacgacaagtggtcttttatcatttgcgctgtatttcttagtgaaaaatccacgtgtattacaaaaggtagcagaagaagcagcacgagttctagtagatcctgttccaagctacaaacaagtcaaacagcttaaatatgttggcatggtcttaaacgaagcgctgcgcttatggccagtagcgcctatgttttccctatatgcaaaagaagatacggtgcttggaggagaatatcctttaacgaaaggcgacgaagtaatggttctggtgcctcagcttcaccgtgataaaatcatttggggagacgatgtggaggagttccgtccagagcgttttgaaaatccaagtgcgattccgcagcatgcgtttaaaccgtttggaaacggtcagcgtgcgtgtatcggtcagcagttcgctcttcatagtgcaacgctggtacttggtatgatgctaaaacactttgactttgaagatcatacaaactacgagctcgtcattaaagaatcgcggacgttaaaacctgaaggctttgtggtaaaagcaaaatcgaaaggcattccgcttggcggtattccttcaccttcgactgaacagggtgctaaaaaagtacgcaaaaaggcagaaaacgctcataatacgccgctgcttgtgctatacggttcaaatgcgggaacagctgaaggaacggcgcgtgatttagcagatattgcaatgagcaaaggatttgcaccgcaggtcgcaacgcttgattcacacgccggtaatcttccgcgcgaaggagctgtattaattgtaacggcgtcttataacggtcatccgcctgataacgcaaagcaatttgtcgattggttagaccaagcgtctgcggatgaagtaaaaggcgttcgctactccgtatttggatgcggcgataaaaattgggcggggacgtatcaaaaagtgcctgcttttatcgatgaaacgcttgccgctaaaggggcagaaaacatcgctaagcgcggtgaagcagatgcaagcgacgactttgaaggcgcgtatgaagaatggcgtgatcatatgtggagtgacgtagcagcctactttggtctcgacattgaaaacagtgaagataataaatctactctttcacttcaatttgtcgacagcgcggcggatatgcctcttgcgaaaatgcacgatgcgttttcaacgaacgtcgtagcaagcaaagaacttcaacagcctggcagtgcacgaagcacgcgacatcttgaaattgaacttccaaaagaagcttcttatcaagaaggagatcatttaggtgttattcctcgctattatgaaggaatagtaaaccgtgtaacacagaggttcggcctaagcgcatcacagctgatccgtctggaagcagaagaagaaaaattagctcatttgccactcgctaaaacagtatccgtagaagagcttctgcaatacgtggagcttcaagatcctgttacgcgcacgcagcttcgcgcaatggctgctaaaacggtctgcccgccgcataaagtagagcttgaagccttgcttggcaagcaagcctataaagaacaggtgctggcaaaacgtttaacaatgcttgaactgcttgaaaaatacccggcgtgtgaaatgagtttcagcgaatttatcgcccttctgccaagcatacgcccgcgctattactcgatttcttcatcacctcgtgtcgatctgaaacaagcaagcatcacggtcagcgttgtcagcggaccggcgtggagcggatatggagaatataaaggaattgcgtcgaactatcttgctgagctgcaagaaggagatacgattacgtgctttatttccacaccgcagtcagagtttacgctgccaaaagaccctgaaacgccgcttatcatggtcggaccgggaacaggcgtcgcgccgtttagaggctttgtgcaggcgcgcaaacagctaaaagaacaaggacagtcacttggagaagcacatttatacttcggctgccgttcacctcatgaagactatctgtatcaagaagagcttgaaaacgcccaaagcgaaggcatcattctgcttcataccgctttttctcgcctgccgaatcagccgaaaacatacgttcagcacgtaatggaacaagacggcaagaaattgattgaacttcttgatcaaggagcgcacttctatatttgcggagacggaattcaaatggcacctgccgttgaagcaacgcttatgaaaagctatgctgacgttcaccaagtgtcggaagcagacgctcgcttatggctgcagcagctagaagaaaaaggccgatacgcaaaagacgtgtggctgggg

SEQ ID NO: 1326 - protein, 1049 aa, synthetic construct
  REGION 1..1049: note = variant of P450 oxidase from Bacillus megaterium
MTIKEMPQPKTFGELKNLPLLNTDKPVQALMRIADELGEIFKFEAPGSVTRYLSSQRLIKEACDESRFDKNLSQGLKFARDFVGDGLVTSWTHEPNWKKAHNILVPSFSQRAMGRYHAMMVDIAVQLVQKWGRLNADEHIEVSEDMTRLTLDTIGLCLFNYRFNSFYRDTPHPFIVSVVRALDEVMNKLQRANPDDPAYDENKRQCQEDIKVMNDYVDKIIADRKNRGEQSHDLLTQMLNGKDPETGEPLDDGNIRQQIITFLIAGHQTTSGLLSFALYFLVKNPRVLQKVAEEAARVLVDPVPSYKQVKQLKYVGMVLNEALRLWPVAPMFSLYAKEDTVLGGEYPLTKGDEVMVLVPQLHRDKIIWGDDVEEFRPERFENPSAIPQHAFKPFGNGQRACIGQQFALHSATLVLGMMLKHFDFEDHTNYELVIKESRTLKPEGFVVKAKSKGIPLGGIPSPSTEQGAKKVRKKAENAHNTPLLVLYGSNAGTAEGTARDLADIAMSKGFAPQVATLDSHAGNLPREGAVLIVTASYNGHPPDNAKQFVDWLDQASADEVKGVRYSVFGCGDKNWAGTYQKVPAFIDETLAAKGAENIAKRGEADASDDFEGAYEEWRDHMWSDVAAYFGLDIENSEDNKSTLSLQFVDSAADMPLAKMHDAFSTNVVASKELQQPGSARSTRHLEIELPKEASYQEGDHLGVIPRYYEGIVNRVTQRFGLSASQLIRLEAEEEKLAHLPLAKTVSVEELLQYVELQDPVTRTQLRAMAAKTVCPPHKVELEALLGKQAYKEQVLAKRLTMLELLEKYPACEMSFSEFIALLPSIRPRYYSISSSPRVDLKQASITVSVVSGPAWSGYGEYKGIASNYLAELQEGDTITCFISTPQSEFTLPKDPETPLIMVGPGTGVAPFRGFVQARKQLKEQGQSLGEAHLYFGCRSPHEDYLYQEELENAQSEGIILLHTAFSRLPNQPKTYVQHVMEQDGKKLIELLDQGAHFYICGDGIQMAPAVEATLMKSYADVHQVSEADARLWLQQLEEKGRYAKDVWLG

SEQ ID NO: 1327 - DNA, 3147 bp, synthetic construct
  misc_feature 1..3147: note = variant of P450 oxidase from Bacillus megaterium
  source 1..3147: mol_type = other DNA
atgacaattaaggaaatgcctcagcctaagacgtttggagaacttaaaaatttaccgttattaaatacagataaaccggttcaagctttgatgcgtattgcggatgaattaggagaaatctttaaattcgaggcgcctggtagcgtaacgcgctatttatcaagtcagcgtctaattaaagaagcatgcgatgaatcacgctttgataaaaacttaagtcaagggcttaaatttgcacgtgattttgttggagacgggctggttacaagctggacgcatgaaccgaattggaaaaaagcgcataatatcttagttccaagctttagtcagcgcgcaatggggcgttatcatgcgatgatggtcgatatcgccgtgcagcttgttcaaaagtgggggcgtctaaatgcagatgagcatattgaagtatcggaagacatgacacgtttaacgcttgatacaattggtctttgcctgtttaactatcgctttaacagcttttaccgagatacgcctcatccatttattgtgagtgtggttcgtgcactggatgaagtaatgaacaagctgcagcgagcaaatccagacgacccagcttatgatgaaaacaagcgccagtgtcaagaagatatcaaggtgatgaacgactatgtagataaaattattgcagatcgcaaaaacaggggtgaacaaagtcatgatttattaacccagatgctaaacggaaaagatccagaaacgggtgagccgcttgatgacgggaatattcgtcagcaaattattacattcttaattgcgggacaccaaacgacaagtggtcttttatcatttgcgctgtatttcttagtgaaaaatccacgtgtattacaaaaggtagcagaagaagcagcacgagttctagtagatcctgttccaagctacaaacaagtcaaacagcttaaatatgttggcatggtcttaaacgaagcgctgcgcttatggccagtagcgcctatgttttccctatatgcaaaagaagatacggtgcttggaggagaatatcctttaacgaaaggcgacgaagtaatggttctggtgcctcagcttcaccgtgataaaatcatttggggagacgatgtggaggagttccgtccagagcgttttgaaaatccaagtgcgattccgcagcatgcgtttaaaccgtttggaaacggtcagcgtgcgtgtatcggtcagcagttcgctcttcatagtgcaacgctggtacttggtatgatgctaaaacactttgactttgaagatcatacaaactacgagctcgtcattaaagaatcgcggacgttaaaacctgaaggctttgtggtaaaagcaaaatcgaaaggcattccgcttggcggtattccttcaccttcgactgaacagggtgctaaaaaagtacgcaaaaaggcagaaaacgctcataatacgccgctgcttgtgctatacggttcaaatgcgggaacagctgaaggaacggcgcgtgatttagcagatattgcaatgagcaaaggatttgcaccgcaggtcgcaacgcttgattcacacgccggtaatcttccgcgcgaaggagctgtattaattgtaacggcgtcttataacggtcatccgcctgataacgcaaagcaatttgtcgattggttagaccaagcgtctgcggatgaagtaaaaggcgttcgctactccgtatttggatgcggcgataaaaattgggcggggacgtatcaaaaagtgcctgcttttatcgatgaaacgcttgccgctaaaggggcagaaaacatcgctaagcgcggtgaagcagatgcaagcgacgactttgaaggcgcgtatgaagaatggcgtgatcatatgtggagtgacgtagcagcctactttggtctcgacattgaaaacagtgaagataataaatctactctttcacttcaatttgtcgacagcgcggcggatatgcctcttgcgaaaatgcacgatgcgttttcaacgaacgtcgtagcaagcaaagaacttcaacagcctggcagtgcacgaagcacgcgacatcttgaaattgaacttccaaaagaagcttcttatcaagaaggagatcatttaggtgttattcctcgctattatgaaggaatagtaaaccgtgtaacacagaggttcggcctaagcgcatcacagctgatccgtctggaagcagaagaagaaaaattagctcatttgccactcgctaaaacagtatccgtagaagagcttctgcaatacgtggagcttcaagatcctgttacgcgcacgcagcttcgcgcaatggctgctaaaacggtctgcccgccgcataaagtagagcttgaagccttgcttggcaagcaagcctataaagaacaggtgctggcaaaacgtttaacaatgcttgaactgcttgaaaaatacccggcgtgtgaaatgagtttcagcgaatttatcgcccttctgccaagcatacgcccgcgctattactcgatttcttcatcacctcgtgtcgatctgaaacaagcaagcatcacggtcagcgttgtcagcggaccggcgtggagcggatatggagaatataaaggaattgcgtcgaactatcttgctgagctgcaagaaggagatacgattacgtgctttatttccacaccgcagtcagagtttacgctgccaaaagaccctgaaacgccgcttatcatggtcggaccgggaacaggcgtcgcgccgtttagaggctttgtgcaggcgcgcaaacagctaaaagaacaaggacagtcacttggagaagcacatttatacttcggctgccgttcacctcatgaagactatctgtatcaagaagagcttgaaaacgcccaaagcgaaggcatcattctgcttaggaccgctttttctcgcatgccgaatcagccgaaaacatacgttcagcacgtaatggaacaagacggcaagaaattgattgaacttcttgatcaaggagcgcacttctatatttgcggagacggaattcaaatggcacctgccgttgaagcaacgcttatgaaaagctatgctgacgttcaccaagtgtcggaagcagacgctcgcttatggctgcagcagctagaagaaaaaggccgatacgcaaaagacgtgtggctgggg

SEQ ID NO: 1328 - protein, 1049 aa, synthetic construct
  REGION 1..1049: note = variant of P450 oxidase from Bacillus megaterium
MTIKEMPQPKTFGELKNLPLLNTDKPVQALMRIADELGEIFKFEAPGSVTRYLSSQRLIKEACDESRFDKNLSQGLKFARDFVGDGLVTSWTHEPNWKKAHNILVPSFSQRAMGRYHAMMVDIAVQLVQKWGRLNADEHIEVSEDMTRLTLDTIGLCLFNYRFNSFYRDTPHPFIVSVVRALDEVMNKLQRANPDDPAYDENKRQCQEDIKVMNDYVDKIIADRKNRGEQSHDLLTQMLNGKDPETGEPLDDGNIRQQIITFLIAGHQTTSGLLSFALYFLVKNPRVLQKVAEEAARVLVDPVPSYKQVKQLKYVGMVLNEALRLWPVAPMFSLYAKEDTVLGGEYPLTKGDEVMVLVPQLHRDKIIWGDDVEEFRPERFENPSAIPQHAFKPFGNGQRACIGQQFALHSATLVLGMMLKHFDFEDHTNYELVIKESRTLKPEGFVVKAKSKGIPLGGIPSPSTEQGAKKVRKKAENAHNTPLLVLYGSNAGTAEGTARDLADIAMSKGFAPQVATLDSHAGNLPREGAVLIVTASYNGHPPDNAKQFVDWLDQASADEVKGVRYSVFGCGDKNWAGTYQKVPAFIDETLAAKGAENIAKRGEADASDDFEGAYEEWRDHMWSDVAAYFGLDIENSEDNKSTLSLQFVDSAADMPLAKMHDAFSTNVVASKELQQPGSARSTRHLEIELPKEASYQEGDHLGVIPRYYEGIVNRVTQRFGLSASQLIRLEAEEEKLAHLPLAKTVSVEELLQYVELQDPVTRTQLRAMAAKTVCPPHKVELEALLGKQAYKEQVLAKRLTMLELLEKYPACEMSFSEFIALLPSIRPRYYSISSSPRVDLKQASITVSVVSGPAWSGYGEYKGIASNYLAELQEGDTITCFISTPQSEFTLPKDPETPLIMVGPGTGVAPFRGFVQARKQLKEQGQSLGEAHLYFGCRSPHEDYLYQEELENAQSEGIILLRTAFSRMPNQPKTYVQHVMEQDGKKLIELLDQGAHFYICGDGIQMAPAVEATLMKSYADVHQVSEADARLWLQQLEEKGRYAKDVWLG

SEQ ID NO: 1329 - DNA, 3147 bp, synthetic construct
  misc_feature 1..3147: note = variant of P450 oxidase from Bacillus megaterium
  source 1..3147: mol_type = other DNA
atgacaattaaggaaatgcctcagcctaagacgtttggagaacttaaaaatttaccgttattaaatacagataaaccggttcaagctttgatgcgtattgcggatgaattaggagaaatctttaaattcgaggcgcctggtagcgtaacgcgctatttatcaagtcagcgtctaattaaagaagcatgcgatgaatcacgctttgataaaaacttaagtcaagggcttaaatttgcacgtgattttgttggagacgggctggttacaagctggacgcatgaaccgaattggaaaaaagcgcataatatcttagttccaagctttagtcagcgcgcaatggggcgttatcatgcgatgatggtcgatatcgccgtgcagcttgttcaaaagtgggggcgtctaaatgcagatgagcatattgaagtatcggaagacatgacacgtttaacgcttgatacaattggtctttgcctgtttaactatcgctttaacagcttttaccgagatacgcctcatccatttattgtgagtgtggttcgtgcactggatgaagtaatgaacaagctgcagcgagcaaatccagacgacccagcttatgatgaaaacaagcgccagtgtcaagaagatatcaaggtgatgaacgactatgtagataaaattattgcagatcgcaaaaacaggggtgaacaaagtcatgatttattaacccagatgctaaacggaaaagatccagaaacgggtgagccgcttgatgacgggaatattcgtcagcaaattattacattcttaattgcgggacaccaaacgacaagtggtcttttatcatttgcgctgtatttcttagtgaaaaatccacgtgtattacaaaaggtagcagaagaagcagcacgagttctagtagatcctgttccaagctacaaacaagtcaaacagcttaaatatgttggcatggtcttaaacgaagcgctgcgcttatggccagtagcgcctatgttttccctatatgcaaaagaagatacggtgcttggaggagaatatcctttaacgaaaggcgacgaagtaatggttctggtgcctcagcttcaccgtgataaaatcatttggggagacgatgtggaggagttccgtccagagcgttttgaaaatccaagtgcgattccgcagcatgcgtttaaaccgtttggaaacggtcagcgtgcgtgtatcggtcagcagttcgctcttcatagtgcaacgctggtacttggtatgatgctaaaacactttgactttgaagatcatacaaactacgagctcgtcattaaagaatcgcggacgttaaaacctgaaggctttgtggtaaaagcaaaatcgaaaggcattccgcttggcggtattccttcaccttcgactgaacagggtgctaaaaaagtacgcaaaaaggcagaaaacgctcataatacgccgctgcttgtgctatacggttcaaatgcgggaacagctgaaggaacggcgcgtgatttagcagatattgcaatgagcaaaggatttgcaccgcaggtcgcaacgcttgattcacacgccggtaatcttccgcgcgaaggagctgtattaattgtaacggcgtcttataacggtcatccgcctgataacgcaaagcaatttgtcgattggttagaccaagcgtctgcggatgaagtaaaaggcgttcgctactccgtatttggatgcggcgataaaaattgggcggggacgtatcaaaaagtgcctgcttttatcgatgaaacgcttgccgctaaaggggcagaaaacatcgctaagcgcggtgaagcagatgcaagcgacgactttgaaggcgcgtatgaagaatggcgtgatcatatgtggagtgacgtagcagcctactttggtctcgacattgaaaacagtgaagataataaatctactctttcacttcaatttgtcgacagcgcggcggatatgcctcttgcgaaaatgcacgatgcgttttcaacgaacgtcgtagcaagcaaagaacttcaacagcctggcagtgcacgaagcacgcgacatcttgaaattgaacttccaaaagaagcttcttatcaagaaggagatcatttaggtgttattcctcgctattatgaaggaatagtaaaccgtgtaacacagaggttcggcctaagcgcatcacagctgatccgtctggaagcagaagaagaaaaattagctcatttgccactcgctaaaacagtatccgtagaagagcttctgcaatacgtggagcttcaagatcctgttacgcgcacgcagcttcgcgcaatggctgctaaaacggtctgcccgccgcataaagtagagcttgaagccttgcttggcaagcaagcctataaagaacaggtgctggcaaaacgtttaacaatgcttgaactgcttgaaaaatacccggcgtgtgaaatgagtttcagcgaatttatcgcccttctgccaagcatacgcccgcgctattactcgatttcttcatcacctcgtgtcgatctgaaacaagcaagcatcacggtcagcgttgtcagcggaccggcgtggagcggatatggagaatataaaggaattgcgtcgaactatcttgctgagctgcaagaaggagatacgattacgtgctttatttccacaccgcagtcagagtttacgctgccaaaagaccctgaaacgccgcttatcatggtcggaccgggaacaggcgtcgcgccgtttagaggctttgtgcaggcgcgcaaacagctaaaagaacaaggacagtcacttggagaagcacatttatacttcggctgccgttcacctcatgaagactatctgtatcaagaagagcttgaaggggcccaaagcgaaggcatcattctgcttcataccgctttttctcgcatgccgaatcagccgaaaacatacgttcagcacgtaatggaacaagacggcaagaaattgattgaacttcttgatcaaggagcgcacttctatatttgcggagacggaattcaaatggcacctgccgttgaagcaacgcttatgaaaagctatgctgacgttcaccaagtgtcggaagcagacgctcgcttatggctgcagcagctagaagaaaaaggccgatacgcaaaagacgtgtggctgggg

SEQ ID NO: 1330 - protein, 1049 aa, synthetic construct
  REGION 1..1049: note = variant of P450 oxidase from Bacillus megaterium
MTIKEMPQPKTFGELKNLPLLNTDKPVQALMRIADELGEIFKFEAPGSVTRYLSSQRLIKEACDESRFDKNLSQGLKFARDFVGDGLVTSWTHEPNWKKAHNILVPSFSQRAMGRYHAMMVDIAVQLVQKWGRLNADEHIEVSEDMTRLTLDTIGLCLFNYRFNSFYRDTPHPFIVSVVRALDEVMNKLQRANPDDPAYDENKRQCQEDIKVMNDYVDKIIADRKNRGEQSHDLLTQMLNGKDPETGEPLDDGNIRQQIITFLIAGHQTTSGLLSFALYFLVKNPRVLQKVAEEAARVLVDPVPSYKQVKQLKYVGMVLNEALRLWPVAPMFSLYAKEDTVLGGEYPLTKGDEVMVLVPQLHRDKIIWGDDVEEFRPERFENPSAIPQHAFKPFGNGQRACIGQQFALHSATLVLGMMLKHFDFEDHTNYELVIKESRTLKPEGFVVKAKSKGIPLGGIPSPSTEQGAKKVRKKAENAHNTPLLVLYGSNAGTAEGTARDLADIAMSKGFAPQVATLDSHAGNLPREGAVLIVTASYNGHPPDNAKQFVDWLDQASADEVKGVRYSVFGCGDKNWAGTYQKVPAFIDETLAAKGAENIAKRGEADASDDFEGAYEEWRDHMWSDVAAYFGLDIENSEDNKSTLSLQFVDSAADMPLAKMHDAFSTNVVASKELQQPGSARSTRHLEIELPKEASYQEGDHLGVIPRYYEGIVNRVTQRFGLSASQLIRLEAEEEKLAHLPLAKTVSVEELLQYVELQDPVTRTQLRAMAAKTVCPPHKVELEALLGKQAYKEQVLAKRLTMLELLEKYPACEMSFSEFIALLPSIRPRYYSISSSPRVDLKQASITVSVVSGPAWSGYGEYKGIASNYLAELQEGDTITCFISTPQSEFTLPKDPETPLIMVGPGTGVAPFRGFVQARKQLKEQGQSLGEAHLYFGCRSPHEDYLYQEELEGAQSEGIILLHTAFSRMPNQPKTYVQHVMEQDGKKLIELLDQGAHFYICGDGIQMAPAVEATLMKSYADVHQVSEADARLWLQQLEEKGRYAKDVWLG

SEQ ID NO: 1331 - DNA, 3147 bp, synthetic construct
  misc_feature 1..3147: note = variant of P450 oxidase from Bacillus megaterium
  source 1..3147: mol_type = other DNA
atgacaattaaggaaatgcctcagcctaagacgtttggagaacttaaaaatttaccgttattaaatacagataaaccggttcaagctttgatgcgtattgcggatgaattaggagaaatctttaaattcgaggcgcctggtagcgtaacgcgctatttatcaagtcagcgtctaattaaagaagcatgcgatgaatcacgctttgataaaaacttaagtcaagggcttaaatttgcacgtgattttgttggagacgggctggttacaagctggacgcatgaaccgaattggaaaaaagcgcataatatcttagttccaagctttagtcagcgcgcaatggggcgttatcatgcgatgatggtcgatatcgccgtgcagcttgttcaaaagtgggggcgtctaaatgcagatgagcatattgaagtatcggaagacatgacacgtttaacgcttgatacaattggtctttgcctgtttaactatcgctttaacagcttttaccgagatacgcctcatccatttattgtgagtgtggttcgtgcactggatgaagtaatgaacaagctgcagcgagcaaatccagacgacccagcttatgatgaaaacaagcgccagtgtcaagaagatatcaaggtgatgaacgactatgtagataaaattattgcagatcgcaaaaacaggggtgaacaaagtcatgatttattaacccagatgctaaacggaaaagatccagaaacgggtgagccgcttgatgacgggaatattcgtcagcaaattattacattcttaattgcgggacaccaaacgacaagtggtcttttatcatttgcgctgtatttcttagtgaaaaatccacgtgtattacaaaaggtagcagaagaagcagcacgagttctagtagatcctgttccaagctacaaacaagtcaaacagcttaaatatgttggcatggtcttaaacgaagcgctgcgcttatggccagtagcgcctatgttttccctatatgcaaaagaagatacggtgcttggaggagaatatcctttaacgaaaggcgacgaagtaatggttctggtgcctcagcttcaccgtgataaaatcatttggggagacgatgtggaggagttccgtccagagcgttttgaaaatccaagtgcgattccgcagcatgcgtttaaaccgtttggaaacggtcagcgtgcgtgtatcggtcagcagttcgctcttcatagtgcaacgctggtacttggtatgatgctaaaacactttgactttgaagatcatacaaactacgagctcgtcattaaagaatcgcggacgttaaaacctgaaggctttgtggtaaaagcaaaatcgaaaggcattccgcttggcggtattccttcaccttcgactgaacagggtgctaaaaaagtacgcaaaaaggcagaaaacgctcataatacgccgctgcttgtgctatacggttcaaatgcgggaacagctgaaggaacggcgcgtgatttagcagatattgcaatgagcaaaggatttgcaccgcaggtcgcaacgcttgattcacacgccggtaatcttccgcgcgaaggagctgtattaattgtaacggcgtcttataacggtcatccgcctgataacgcaaagcaatttgtcgattggttagaccaagcgtctgcggatgaagtaaaaggcgttcgctactccgtatttggatgcggcgataaaaattgggcggggacgtatcaaaaagtgcctgcttttatcgatgaaacgcttgccgctaaaggggcagaaaacatcgctaagcgcggtgaagcagatgcaagcgacgactttgaaggcgcgtatgaagaatggcgtgatcatatgtggagtgacgtagcagcctactttggtctcgacattgaaaacagtgaagataataaatctactctttcacttcaatttgtcgacagcgcggcggatatgcctcttgcgaaaatgcacgatgcgttttcaacgaacgtcgtagcaagcaaagaacttcaacagcctggcagtgcacgaagcacgcgacatcttgaaattgaacttccaaaagaagcttcttatcaagaaggagatcatttaggtgttattcctcgctattatgaaggaatagtaaaccgtgtaacacagaggttcggcctaagcgcatggcagctgatccgtctggaagcagaagaagaaaaattagctcatttgccactcgctaaaacagtatccgtagaagagcttctgcaatacgtggagcttcaagatcctgttacgcgcacgcagcttcgcgcaatggctgctaaaacggtctgcccgccgcataaagtagagcttgaagccttgcttggcaagcaagcctataaagaacaggtgctggcaaaacgtttaacaatgcttgaactgcttgaaaaatacccggcgtgtgaaatgagtttcagcgaatttatcgcccttctgccaagcatacgcccgcgctattactcgatttcttcatcacctcgtgtcgatctgaaacaagcaagcatcacggtcagcgttgtcagcggaccggcgtggagcggatatggagaatataaaggaattgcgtcgaactatcttgctgagctgcaagaaggagatacgattacgtgctttatttccacaccgcagtcagagtttacgctgccaaaagaccctgaaacgccgcttatcatggtcggaccgggaacaggcgtcgcgccgtttagaggctttgtgcaggcgcgcaaacagctaaaagaacaaggacagtcacttggagaagcacatttatacttcggctgccgttcacctcatgaagactatctgtatcaagaagagcttgaaaacgcccaaagcgaaggcatcattctgcttcataccgctttttctcgcatgccgaatcagccgaaaacatacgttcagcacgtaatggaacaagacggcaagaaattgattgaacttcttgatcaaggagcgcacttctatatttgcggagacggaattcaaatggcacctgccgttgaagcaacgcttatgaaaagctatgctgacgttcaccaagtgtcggaagcagacgctcgcttatggctgcagcagctagaagaaaaaggccgatacgcaaaagacgtgtggctgggg

SEQ ID NO: 1332 - protein, 1049 aa, synthetic construct
  REGION 1..1049: note = variant of P450 oxidase from Bacillus megaterium
MTIKEMPQPKTFGELKNLPLLNTDKPVQALMRIADELGEIFKFEAPGSVTRYLSSQRLIKEACDESRFDKNLSQGLKFARDFVGDGLVTSWTHEPNWKKAHNILVPSFSQRAMGRYHAMMVDIAVQLVQKWGRLNADEHIEVSEDMTRLTLDTIGLCLFNYRFNSFYRDTPHPFIVSVVRALDEVMNKLQRANPDDPAYDENKRQCQEDIKVMNDYVDKIIADRKNRGEQSHDLLTQMLNGKDPETGEPLDDGNIRQQIITFLIAGHQTTSGLLSFALYFLVKNPRVLQKVAEEAARVLVDPVPSYKQVKQLKYVGMVLNEALRLWPVAPMFSLYAKEDTVLGGEYPLTKGDEVMVLVPQLHRDKIIWGDDVEEFRPERFENPSAIPQHAFKPFGNGQRACIGQQFALHSATLVLGMMLKHFDFEDHTNYELVIKESRTLKPEGFVVKAKSKGIPLGGIPSPSTEQGAKKVRKKAENAHNTPLLVLYGSNAGTAEGTARDLADIAMSKGFAPQVATLDSHAGNLPREGAVLIVTASYNGHPPDNAKQFVDWLDQASADEVKGVRYSVFGCGDKNWAGTYQKVPAFIDETLAAKGAENIAKRGEADASDDFEGAYEEWRDHMWSDVAAYFGLDIENSEDNKSTLSLQFVDSAADMPLAKMHDAFSTNVVASKELQQPGSARSTRHLEIELPKEASYQEGDHLGVIPRYYEGIVNRVTQRFGLSAWQLIRLEAEEEKLAHLPLAKTVSVEELLQYVELQDPVTRTQLRAMAAKTVCPPHKVELEALLGKQAYKEQVLAKRLTMLELLEKYPACEMSFSEFIALLPSIRPRYYSISSSPRVDLKQASITVSVVSGPAWSGYGEYKGIASNYLAELQEGDTITCFISTPQSEFTLPKDPETPLIMVGPGTGVAPFRGFVQARKQLKEQGQSLGEAHLYFGCRSPHEDYLYQEELENAQSEGIILLHTAFSRMPNQPKTYVQHVMEQDGKKLIELLDQGAHFYICGDGIQMAPAVEATLMKSYADVHQVSEADARLWLQQLEEKGRYAKDVWLG

SEQ ID NO: 1333 - DNA, 3147 bp, synthetic construct
  misc_feature 1..3147: note = variant of P450 oxidase from Bacillus megaterium
  source 1..3147: mol_type = other DNA
atgacaattaaggaaatgcctcagcctaagacgtttggagaacttaaaaatttaccgttattaaatacagataaaccggttcaagctttgatgcgtattgcggatgaattaggagaaatctttaaattcgaggcgcctggtagcgtaacgcgctatttatcaagtcagcgtctaattaaagaagcatgcgatgaatcacgctttgataaaaacttaagtcaagggcttaaatttgcacgtgattttgttggagacgggctggttacaagctggacgcatgaaccgaattggaaaaaagcgcataatatcttagttccaagctttagtcagcgcgcaatggggcgttatcatgcgatgatggtcgatatcgccgtgcagcttgttcaaaagtgggggcgtctaaatgcagatgagcatattgaagtatcggaagacatgacacgtttaacgcttgatacaattggtctttgcctgtttaactatcgctttaacagcttttaccgagatacgcctcatccatttattgtgagtgtggttcgtgcactggatgaagtaatgaacaagctgcagcgagcaaatccagacgacccagcttatgatgaaaacaagcgccagtgtcaagaagatatcaaggtgatgaacgactatgtagataaaattattgcagatcgcaaaaacaggggtgaacaaagtcatgatttattaacccagatgctaaacggaaaagatccagaaacgggtgagccgcttgatgacgggaatattcgtcagcaaattattacattcttaattgcgggacaccaaacgacaagtggtcttttatcatttgcgctgtatttcttagtgaaaaatccacgtgtattacaaaaggtagcagaagaagcagcacgagttctagtagatcctgttccaagctacaaacaagtcaaacagcttaaatatgttggcatggtcttaaacgaagcgctgcgcttatggccagtagcgcctatgttttccctatatgcaaaagaagatacggtgcttggaggagaatatcctttaacgaaaggcgacgaagtaatggttctggtgcctcagcttcaccgtgataaaatcatttggggagacgatgtggaggagttccgtccagagcgttttgaaaatccaagtgcgattccgcagcatgcgtttaaaccgtttggaaacggtcagcgtgcgtgtatcggtcagcagttcgctcttcatagtgcaacgctggtacttggtatgatgctaaaacactttgactttgaagatcatacaaactacgagctcgtcattaaagaatcgcggacgttaaaacctgaaggctttgtggtaaaagcaaaatcgaaaggcattccgcttggcggtattccttcaccttcgactgaacagggtgctaaaaaagtacgcaaaaaggcagaaaacgctcataatacgccgctgcttgtgctatacggttcaaatgcgggaacagctgaaggaacggcgcgtgatttagcagatattgcaatgagcaaaggatttgcaccgcaggtcgcaacgcttgattcacacgccggtaatcttccgcgcgaaggagctgtattaattgtaacggcgtcttataacggtcatccgcctgataacgcaaagcaatttgtcgattggttagaccaagcgtctgcggatgaagtaaaaggcgttcgctactccgtatttggatgcggcgataaaaattgggcggggacgtatcaaaaagtgcctgcttttatcgatgaaacgcttgccgctaaaggggcagaaaacatcgctaagcgcggtgaagcagatgcaagcgacgactttgaaggcgcgtatgaagaatggcgtgatcatatgtggagtgacgtagcagcctactttggtctcgacattgaaaacagtgaagataataaatctactctttcacttcaatttgtcgacagcgcggcggatatgcctcttgcgaaaatgcacgatgcgttttcaacgaacgtcgtagcaagcaaagaacttcaacagcctggcagtgcacgaagcacgcgacatcttgaaattgaacttccaaaagaagcttcttatcaagaaggagatcatttaggtgttattcctcgctattatgaaggaatagtaaaccgtgtaacacagaggttcggcctaagcgcatcacagctgatccgtctggaagcagaagaagaaaaattagctcatttgccactcgctaaaacagtatccgtagaagagcttctgcaatacgtggagcttcaagatcctgttacgcgcacgcagcttcgcgcaatggctgctaaaacggtctgcccgccgcataaagtagagcttgaagccttgcttggcaagcaagcctataaagaacaggtgctggcaaaacgtttaacaatgcttgaactgcttgaaaaatacccgagttgtgaaatgagtttcagcgaatttatcgcccttctgccaagcatacgcccgcgctattactcgatttcttcatcacctcgtgtcgatctgaaacaagcaagcatcacggtcagcgttgtcagcggaccggcgtggagcggatatggagaatataaaggaattgcgtcgaactatcttgctgagctgcaagaaggagatacgattacgtgctttatttccacaccgcagtcagagtttacgctgccaaaagaccctgaaacgccgcttatcatggtcggaccgggaacaggcgtcgcgccgtttagaggctttgtgcaggcgcgcaaacagctaaaagaacaaggacagtcacttggagaagcacatttatacttcggctgccgttcacctcatgaagactatctgtatcaagaagagcttgaaaacgcccaaagcgaaggcatcattctgcttcataccgctttttctcgcatgccgaatcagccgaaaacatacgttcagcacgtaatggaacaagacggcaagaaattgattgaacttcttgatcaaggagcgcacttctatatttgcggagacggaattcaaatggcacctgccgttgaagcaacgcttatgaaaagctatgctgacgttcaccaagtgtcggaagcagacgctcgcttatggctgcagcagctagaagaaaaaggccgatacgcaaaagacgtgtggctgggg

SEQ ID NO: 1334 - protein, 1049 aa, synthetic construct
  REGION 1..1049: note = variant of P450 oxidase from Bacillus megaterium
MTIKEMPQPKTFGELKNLPLLNTDKPVQALMRIADELGEIFKFEAPGSVTRYLSSQRLIKEACDESRFDKNLSQGLKFARDFVGDGLVTSWTHEPNWKKAHNILVPSFSQRAMGRYHAMMVDIAVQLVQKWGRLNADEHIEVSEDMTRLTLDTIGLCLFNYRFNSFYRDTPHPFIVSVVRALDEVMNKLQRANPDDPAYDENKRQCQEDIKVMNDYVDKIIADRKNRGEQSHDLLTQMLNGKDPETGEPLDDGNIRQQIITFLIAGHQTTSGLLSFALYFLVKNPRVLQKVAEEAARVLVDPVPSYKQVKQLKYVGMVLNEALRLWPVAPMFSLYAKEDTVLGGEYPLTKGDEVMVLVPQLHRDKIIWGDDVEEFRPERFENPSAIPQHAFKPFGNGQRACIGQQFALHSATLVLGMMLKHFDFEDHTNYELVIKESRTLKPEGFVVKAKSKGIPLGGIPSPSTEQGAKKVRKKAENAHNTPLLVLYGSNAGTAEGTARDLADIAMSKGFAPQVATLDSHAGNLPREGAVLIVTASYNGHPPDNAKQFVDWLDQASADEVKGVRYSVFGCGDKNWAGTYQKVPAFIDETLAAKGAENIAKRGEADASDDFEGAYEEWRDHMWSDVAAYFGLDIENSEDNKSTLSLQFVDSAADMPLAKMHDAFSTNVVASKELQQPGSARSTRHLEIELPKEASYQEGDHLGVIPRYYEGIVNRVTQRFGLSASQLIRLEAEEEKLAHLPLAKTVSVEELLQYVELQDPVTRTQLRAMAAKTVCPPHKVELEALLGKQAYKEQVLAKRLTMLELLEKYPSCEMSFSEFIALLPSIRPRYYSISSSPRVDLKQASITVSVVSGPAWSGYGEYKGIASNYLAELQEGDTITCFISTPQSEFTLPKDPETPLIMVGPGTGVAPFRGFVQARKQLKEQGQSLGEAHLYFGCRSPHEDYLYQEELENAQSEGIILLHTAFSRMPNQPKTYVQHVMEQDGKKLIELLDQGAHFYICGDGIQMAPAVEATLMKSYADVHQVSEADARLWLQQLEEKGRYAKDVWLG

SEQ ID NO: 1335 - DNA, 3147 bp, synthetic construct
  misc_feature 1..3147: note = variant of P450 oxidase from Bacillus megaterium
  source 1..3147: mol_type = other DNA
atgacaattaaggaaatgcctcagcctaagacgtttggagaacttaaaaatttaccgttattaaatacagataaaccggttcaagctttgatgcgtattgcggatgaattaggagaaatctttaaattcgaggcgcctggtagcgtaacgcgctatttatcaagtcagcgtctaattaaagaagcatgcgatgaatcacgctttgataaaaacttaagtcaagggcttaaatttgcacgtgattttgttggagacgggctggttacaagctggacgcatgaaccgaattggaaaaaagcgcataatatcttagttccaagctttagtcagcgcgcaatggggcgttatcatgcgatgatggtcgatatcgccgtgcagcttgttcaaaagtgggggcgtctaaatgcagatgagcatattgaagtatcggaagacatgacacgtttaacgcttgatacaattggtctttgcctgtttaactatcgctttaacagcttttaccgagatacgcctcatccatttattgtgagtgtggttcgtgcactggatgaagtaatgaacaagctgcagcgagcaaatccagacgacccagcttatgatgaaaacaagcgccagtgtcaagaagatatcaaggtgatgaacgactatgtagataaaattattgcagatcgcaaaaacaggggtgaacaaagtcatgatttattaacccagatgctaaacggaaaagatccagaaacgggtgagccgcttgatgacgggaatattcgtcagcaaattattacattcttaattgcgggacaccaaacgacaagtggtcttttatcatttgcgctgtatttcttagtgaaaaatccacgtgtattacaaaaggtagcagaagaagcagcacgagttctagtagatcctgttccaagctacaaacaagtcaaacagcttaaatatgttggcatggtcttaaacgaagcgctgcgcttatggccagtagcgcctatgttttccctatatgcaaaagaagatacggtgcttggaggagaatatcctttaacgaaaggcgacgaagtaatggttctggtgcctcagcttcaccgtgataaaatcatttggggagacgatgtggaggagttccgtccagagcgttttgaaaatccaagtgcgattccgcagcatgcgtttaaaccgtttggaaacggtcagcgtgcgtgtatcggtcagcagttcgctcttcatagtgcaacgctggtacttggtatgatgctaaaacactttgactttgaagatcatacaaactacgagctcgtcattaaagaatcgcggacgttaaaacctgaaggctttgtggtaaaagcaaaatcgaaaggcattccgcttggcggtattccttcaccttcgactgaacagggtgctaaaaaagtacgcaaaaaggcagaaaacgctcataatacgccgctgcttgtgctatacggttcaaatgcgggaacagctgaaggaacggcgcgtgatttagcagatattgcaatgagcaaaggatttgcaccgcaggtcgcaacgcttgattcacacgccggtaatcttccgcgcgaaggagctgtattaattgtaacggcgtcttataacggtcatccgcctgataacgcaaagcaatttgtcgattggttagaccaagcgtctgcggatgaagtaaaaggcgttcgctactccgtatttggatgcggcgataaaaattgggcggggacgtatcaaaaagtgcctgcttttatcgatgaaacgcttgccgctaaaggggcagaaaacatcgctaagcgcggtgaagcagatgcaagcgacgactttgaaggcgcgtatgaagaatggcgtgatcatatgtggagtgacgtagcagcctactttggtctcgacattgaaaacagtgaagataataaatctactctttcacttcaatttgtcgacagcgcggcggatatgcctcttgcgaaaatgcacgatgcgttttcaacgaacgtcgtagcaagcaaagaacttcaacagcctggcagtgcacgaagcacgcgacatcttgaaattgaacttccaaaagaagcttcttatcaagaaggagatcatttaggtgttattcctcgctattatgaaggaatagtaaaccgtgtaacacagaggttcggcctaagcgcatcacagctgatccgtctggaagcagaagaagaaaaattagctcatttgccactcgctaaaacagtatccgtagaagagcttctgcaatacgtggagcttcaagatcctgttacgcgcacgcagcttcgcgcaatggctgctaaaacggtctgcccgccgcataaagtagagcttgaagccttgcttggcaagcaagcctataaagaacaggtgctggcaaaacgtttaacaatgcttgaactgcttgaaaaatacccggcgtgtgaaatgagtttcagcgaatttatcgcccttctgccaagcatacgcccgcgctattactcgatttcttcatcacctcgtgtcgatctgaaacaagcaagcatcacggtcagcgttgtcagcggaccggcgtggagcggatatggagaatataaaggaattgcgtcgaactatcttgctgagctgcaagaaggagatacgattacgtgctttatttccacaccgcagtcagagtttacgctgccaaaagaccctgaaacgccgcttatcatggtcggaccgggaacaggcgtcgcgccgtttagaggctttgtgcaggcgcgcaaacagctaaaagaacaaggacagtcacttggagaagcacatttatacttcggctgccgttcacctcatgaagactatctgtatcaagaagagcttgaaaacgcccaaagcgaaggcatcattctgcttcataccgctttttctcgcatgccgaatcagccgaaaacatacgttcagcacgtaatggaacaagacggcaagaaattgattgaacttcttgatcaaggagcgcacttctatatttgcggagacggaattcaaatggcacctgccgttgaagcaacgcttatgaaaagctatgctgacgttcaccaagtgtcggaagcagacgctcgcttatggctgcagcagctagaagaaaaacgtcgatacgcaaaagacgtgtggctgggg

SEQ ID NO: 1336 - protein, 1049 aa, synthetic construct
  REGION 1..1049: note = variant of P450 oxidase from Bacillus megaterium
MTIKEMPQPKTFGELKNLPLLNTDKPVQALMRIADELGEIFKFEAPGSVTRYLSSQRLIKEACDESRFDKNLSQGLKFARDFVGDGLVTSWTHEPNWKKAHNILVPSFSQRAMGRYHAMMVDIAVQLVQKWGRLNADEHIEVSEDMTRLTLDTIGLCLFNYRFNSFYRDTPHPFIVSVVRALDEVMNKLQRANPDDPAYDENKRQCQEDIKVMNDYVDKIIADRKNRGEQSHDLLTQMLNGKDPETGEPLDDGNIRQQIITFLIAGHQTTSGLLSFALYFLVKNPRVLQKVAEEAARVLVDPVPSYKQVKQLKYVGMVLNEALRLWPVAPMFSLYAKEDTVLGGEYPLTKGDEVMVLVPQLHRDKIIWGDDVEEFRPERFENPSAIPQHAFKPFGNGQRACIGQQFALHSATLVLGMMLKHFDFEDHTNYELVIKESRTLKPEGFVVKAKSKGIPLGGIPSPSTEQGAKKVRKKAENAHNTPLLVLYGSNAGTAEGTARDLADIAMSKGFAPQVATLDSHAGNLPREGAVLIVTASYNGHPPDNAKQFVDWLDQASADEVKGVRYSVFGCGDKNWAGTYQKVPAFIDETLAAKGAENIAKRGEADASDDFEGAYEEWRDHMWSDVAAYFGLDIENSEDNKSTLSLQFVDSAADMPLAKMHDAFSTNVVASKELQQPGSARSTRHLEIELPKEASYQEGDHLGVIPRYYEGIVNRVTQRFGLSASQLIRLEAEEEKLAHLPLAKTVSVEELLQYVELQDPVTRTQLRAMAAKTVCPPHKVELEALLGKQAYKEQVLAKRLTMLELLEKYPACEMSFSEFIALLPSIRPRYYSISSSPRVDLKQASITVSVVSGPAWSGYGEYKGIASNYLAELQEGDTITCFISTPQSEFTLPKDPETPLIMVGPGTGVAPFRGFVQARKQLKEQGQSLGEAHLYFGCRSPHEDYLYQEELENAQSEGIILLHTAFSRMPNQPKTYVQHVMEQDGKKLIELLDQGAHFYICGDGIQMAPAVEATLMKSYADVHQVSEADARLWLQQLEEKRRYAKDVWLG

SEQ ID NO: 1337 - DNA, 3147 bp, synthetic construct
  misc_feature 1..3147: note = variant of P450 oxidase from Bacillus megaterium
  source 1..3147: mol_type = other DNA
atgacaattaaggaaatgcctcagcctaagacgtttggagaacttaaaaatttaccgttattaaatacagataaaccggttcaagctttgatgcgtattgcggatgaattaggagaaatctttaaattcgaggcgcctggtagcgtaacgcgctatttatcaagtcagcgtctaattaaagaagcatgcgatgaatcacgctttgataaaaacttaagtcaagggcttaaatttgcacgtgattttgttggagacgggctggttacaagctggacgcatgaaccgaattggaaaaaagcgcataatatcttagttccaagctttagtcagcgcgcaatggggcgttatcatgcgatgatggtcgatatcgccgtgcagcttgttcaaaagtgggggcgtctaaatgcagatgagcatattgaagtatcggaagacatgacacgtttaacgcttgatacaattggtctttgcctgtttaactatcgctttaacagcttttaccgagatacgcctcatccatttattgtgagtgtggttcgtgcactggatgaagtaatgaacaagctgcagcgagcaaatccagacgacccagcttatgatgaaaacaagcgccagtgtcaagaagatatcaaggtgatgaacgactatgtagataaaattattgcagatcgcaaaaacaggggtgaacaaagtcatgatttattaacccagatgctaaacggaaaagatccagaaacgggtgagccgcttgatgacgggaatattcgtcagcaaattattacattcttaattgcgggacaccaaacgacaagtggtcttttatcatttgcgctgtatttcttagtgaaaaatccacgtgtattacaaaaggtagcagaagaagcagcacgagttctagtagatcctgttccaagctacaaacaagtcaaacagcttaaatatgttggcatggtcttaaacgaagcgctgcgcttatggccagtagcgcctatgttttccctatatgcaaaagaagatacggtgcttggaggagaatatcctttaacgaaaggcgacgaagtaatggttctggtgcctcagcttcaccgtgataaaatcatttggggagacgatgtggaggagttccgtccagagcgttttgaaaatccaagtgcgattccgcagcatgcgtttaaaccgtttggaaacggtcagcgtgcgtgtatcggtcagcagttcgctcttcatagtgcaacgctggtacttggtatgatgctaaaacactttgactttgaagatcatacaaactacgagctcgtcattaaagaatcgcggacgttaaaacctgaaggctttgtggtaaaagcaaaatcgaaaggcattccgcttggcggtattccttcaccttcgactgaacagggtgctaaaaaagtacgcaaaaaggcagaaaacgctcataatacgccgctgcttgtgctatacggttcaaatgcgggaacagctgaaggaacggcgcgtgatttagcagatattgcaatgagcaaaggatttgcaccgcaggtcgcaacgcttgattcacacgccggtaatcttccgcgcgaaggagctgtattaattgtaacggcgtcttataacggtcatccgcctgataacgcaaagcaatttgtcgattggttagaccaagcgtctgcggatgaagtaaaaggcgttcgctactccgtatttggatgcggcgataaaaattgggcggggacgtatcaaaaagtgcctgcttttatcgatgaaacgcttgccgctaaaggggcagaaaacatcgctaagcgcggtgaagcagatgcaagcgacgactttgaaggcgcgtatgaagaatggcgtgatcatatgtggagtgacgtagcagcctactttggtctcgacattgaaaacagtgaagataataaatctactctttcacttcaatttgtcgacagcgcggcggatatgcctcttgcgaaaatgcacgatgcgttttcaacgaacgtcgtagcaagcaaagaacttcaacagcctggcagtgcacgaagcacgcgacatcttgaaattgaacttccaaaagaagcttcttatcaagaaggagatcatttaggtgttattcctcgctattatgaaggaatagtaaaccgtgtaacacagaggttcggcctaagcgcatcacagctgatccgtctggaagcagaagaagaaaaattagctcatttgccactcgctaaaacagtatccgtagaagagcttctgcaatacgtggagcttcaagatcctgttacgcgcacgcagcttcgcgcaatggctgctaaaacggtctgcccgccgcataaagtaattcttgaagccttgcttggcaagcaagcctataaagaacaggtgctggcaaaacgtttaacaatgcttgaactgcttgaaaaatacccggcgtgtgaaatgagtttcagcgaatttatcgcccttctgccaagcatacgcccgcgctattactcgatttcttcatcacctcgtgtcgatctgaaacaagcaagcatcacggtcagcgttgtcagcggaccggcgtggagcggatatggagaatataaaggaattgcgtcgaactatcttgctgagctgcaagaaggagatacgattacgtgctttatttccacaccgcagtcagagtttacgctgccaaaagaccctgaaacgccgcttatcatggtcggaccgggaacaggcgtcgcgccgtttagaggctttgtgcaggcgcgcaaacagctaaaagaacaaggacagtcacttggagaagcacatttatacttcggctgccgttcacctcatgaagactatctgtatcaagaagagcttgaaaacgcccaaagcgaaggcatcattctgcttcataccgctttttctcgcatgccgaatcagccgaaaacatacgttcagcacgtaatggaacaagacggcaagaaattgattgaacttcttgatcaaggagcgcacttctatatttgcggagacggaattcaaatggcacctgccgttgaagcaacgcttatgaaaagctatgctgacgttcaccaagtgtcggaagcagacgctcgcttatggctgcagcagctagaagaaaaaggccgatacgcaaaagacgtgtggctgggg

SEQ ID NO: 1338 - protein, 1049 aa, synthetic construct
  REGION 1..1049: note = variant of P450 oxidase from Bacillus megaterium
MTIKEMPQPKTFGELKNLPLLNTDKPVQALMRIADELGEIFKFEAPGSVTRYLSSQRLIKEACDESRFDKNLSQGLKFARDFVGDGLVTSWTHEPNWKKAHNILVPSFSQRAMGRYHAMMVDIAVQLVQKWGRLNADEHIEVSEDMTRLTLDTIGLCLFNYRFNSFYRDTPHPFIVSVVRALDEVMNKLQRANPDDPAYDENKRQCQEDIKVMNDYVDKIIADRKNRGEQSHDLLTQMLNGKDPETGEPLDDGNIRQQIITFLIAGHQTTSGLLSFALYFLVKNPRVLQKVAEEAARVLVDPVPSYKQVKQLKYVGMVLNEALRLWPVAPMFSLYAKEDTVLGGEYPLTKGDEVMVLVPQLHRDKIIWGDDVEEFRPERFENPSAIPQHAFKPFGNGQRACIGQQFALHSATLVLGMMLKHFDFEDHTNYELVIKESRTLKPEGFVVKAKSKGIPLGGIPSPSTEQGAKKVRKKAENAHNTPLLVLYGSNAGTAEGTARDLADIAMSKGFAPQVATLDSHAGNLPREGAVLIVTASYNGHPPDNAKQFVDWLDQASADEVKGVRYSVFGCGDKNWAGTYQKVPAFIDETLAAKGAENIAKRGEADASDDFEGAYEEWRDHMWSDVAAYFGLDIENSEDNKSTLSLQFVDSAADMPLAKMHDAFSTNVVASKELQQPGSARSTRHLEIELPKEASYQEGDHLGVIPRYYEGIVNRVTQRFGLSASQLIRLEAEEEKLAHLPLAKTVSVEELLQYVELQDPVTRTQLRAMAAKTVCPPHKVILEALLGKQAYKEQVLAKRLTMLELLEKYPACEMSFSEFIALLPSIRPRYYSISSSPRVDLKQASITVSVVSGPAWSGYGEYKGIASNYLAELQEGDTITCFISTPQSEFTLPKDPETPLIMVGPGTGVAPFRGFVQARKQLKEQGQSLGEAHLYFGCRSPHEDYLYQEELENAQSEGIILLHTAFSRMPNQPKTYVQHVMEQDGKKLIELLDQGAHFYICGDGIQMAPAVEATLMKSYADVHQVSEADARLWLQQLEEKGRYAKDVWLG

SEQ ID NO: 1339 - DNA, 3147 bp, synthetic construct
  misc_feature 1..3147: note = variant of P450 oxidase from Bacillus megaterium
  source 1..3147: mol_type = other DNA
atgacaattaaggaaatgcctcagcctaagacgtttggagaacttaaaaatttaccgttattaaatacagataaaccggttcaagctttgatgcgtattgcggatgaattaggagaaatctttaaattcgaggcgcctggtagcgtaacgcgctatttatcaagtcagcgtctaattaaagaagcatgcgatgaatcacgctttgataaaaacttaagtcaagggcttaaatttgcacgtgattttgttggagacgggctggttacaagctggacgcatgaaccgaattggaaaaaagcgcataatatcttagttccaagctttagtcagcgcgcaatggggcgttatcatgcgatgatggtcgatatcgccgtgcagcttgttcaaaagtgggggcgtctaaatgcagatgagcatattgaagtatcggaagacatgacacgtttaacgcttgatacaattggtctttgcctgtttaactatcgctttaacagcttttaccgagatacgcctcatccatttattgtgagtgtggttcgtgcactggatgaagtaatgaacaagctgcagcgagcaaatccagacgacccagcttatgatgaaaacaagcgccagtgtcaagaagatatcaaggtgatgaacgactatgtagataaaattattgcagatcgcaaaaacaggggtgaacaaagtcatgatttattaacccagatgctaaacggaaaagatccagaaacgggtgagccgcttgatgacgggaatattcgtcagcaaattattacattcttaattgcgggacaccaaacgacaagtggtcttttatcatttgcgctgtatttcttagtgaaaaatccacgtgtattacaaaaggtagcagaagaagcagcacgagttctagtagatcctgttccaagctacaaacaagtcaaacagcttaaatatgttggcatggtcttaaacgaagcgctgcgcttatggccagtagcgcctatgttttccctatatgcaaaagaagatacggtgcttggaggagaatatcctttaacgaaaggcgacgaagtaatggttctggtgcctcagcttcaccgtgataaaatcatttggggagacgatgtggaggagttccgtccagagcgttttgaaaatccaagtgcgattccgcagcatgcgtttaaaccgtttggaaacggtcagcgtgcgtgtatcggtcagcagttcgctcttcatagtgcaacgctggtacttggtatgatgctaaaacactttgactttgaagatcatacaaactacgagctcgtcattaaagaatcgcggacgttaaaacctgaaggctttgtggtaaaagcaaaatcgaaaggcattccgcttggcggtattccttcaccttcgactgaacagggtgctaaaaaagtacgcaaaaaggcagaaaacgctcataatacgccgctgcttgtgctatacggttcaaatgcgggaacagctgaaggaacggcgcgtgatttagcagatattgcaatgagcaaaggatttgcaccgcaggtcgcaacgcttgattcacacgccggtaatcttccgcgcgaaggagctgtattaattgtaacggcgtcttataacggtcatccgcctgataacgcaaagcaatttgtcgattggttagaccaagcgtctgcggatgaagtaaaaggcgttcgctactccgtatttggatgcggcgataaaaattgggcggggacgtatcaaaaagtgcctgcttttatcgatgaaacgcttgccgctaaaggggcagaaaacatcgctaagcgcggtgaagcagatgcaagcgacgactttgaaggcgcgtatgaagaatggcgtgatcatatgtggagtgacgtagcagcctactttggtctcgacattgaaaacagtgaagataataaatctactctttcacttcaatttgtcgacagcgcggcggatatgcctcttgcgaaaatgcacgatgcgttttcaacgaacgtcgtagcaagcaaagaacttcaacagcctggcagtgcacgaagcacgcgacatcttgaaattgaacttccaaaagaagcttcttatcaagaaggagatcatttaggtgttattcctcgctattatgaaggaatagtaaaccgtgtaacacagaggttcggcctaagcgcatcacagctgatccgtctgtgggcagaagaagaaaaattagctcatttgccactcgctaaaacagtatccgtagaagagcttctgcaatacgtggagcttcaagatcctgttacgcgcacgcagcttcgcgcaatggctgctaaaacggtctgcccgccgcataaagtagagcttgaagccttgcttggcaagcaagcctataaagaacaggtgctggcaaaacgtttaacaatgcttgaactgcttgaaaaatacccggcgtgtgaaatgagtttcagcgaatttatcgcccttctgccaagcatacgcccgcgctattactcgatttcttcatcacctcgtgtcgatctgaaacaagcaagcatcacggtcagcgttgtcagcggaccggcgtggagcggatatggagaatataaaggaattgcgtcgaactatcttgctgagctgcaagaaggagatacgattacgtgctttatttccacaccgcagtcagagtttacgctgccaaaagaccctgaaacgccgcttatcatggtcggaccgggaacaggcgtcgcgccgtttagaggctttgtgcaggcgcgcaaacagctaaaagaacaaggacagtcacttggagaagcacatttatacttcggctgccgttcacctcatgaagactatctgtatcaagaagagcttgaaaacgcccaaagcgaaggcatcattctgcttcataccgctttttctcgcatgccgaatcagccgaaaacatacgttcagcacgtaatggaacaagacggcaagaaattgattgaacttcttgatcaaggagcgcacttctatatttgcggagacggaattcaaatggcacctgccgttgaagcaacgcttatgaaaagctatgctgacgttcaccaagtgtcggaagcagacgctcgcttatggctgcagcagctagaagaaaaaggccgatacgcaaaagacgtgtggctgggg

SEQ ID NO: 1340 - protein, 1049 aa, synthetic construct
  REGION 1..1049: note = variant of P450 oxidase from Bacillus megaterium
MTIKEMPQPKTFGELKNLPLLNTDKPVQALMRIADELGEIFKFEAPGSVTRYLSSQRLIKEACDESRFDKNLSQGLKFARDFVGDGLVTSWTHEPNWKKAHNILVPSFSQRAMGRYHAMMVDIAVQLVQKWGRLNADEHIEVSEDMTRLTLDTIGLCLFNYRFNSFYRDTPHPFIVSVVRALDEVMNKLQRANPDDPAYDENKRQCQEDIKVMNDYVDKIIADRKNRGEQSHDLLTQMLNGKDPETGEPLDDGNIRQQIITFLIAGHQTTSGLLSFALYFLVKNPRVLQKVAEEAARVLVDPVPSYKQVKQLKYVGMVLNEALRLWPVAPMFSLYAKEDTVLGGEYPLTKGDEVMVLVPQLHRDKIIWGDDVEEFRPERFENPSAIPQHAFKPFGNGQRACIGQQFALHSATLVLGMMLKHFDFEDHTNYELVIKESRTLKPEGFVVKAKSKGIPLGGIPSPSTEQGAKKVRKKAENAHNTPLLVLYGSNAGTAEGTARDLADIAMSKGFAPQVATLDSHAGNLPREGAVLIVTASYNGHPPDNAKQFVDWLDQASADEVKGVRYSVFGCGDKNWAGTYQKVPAFIDETLAAKGAENIAKRGEADASDDFEGAYEEWRDHMWSDVAAYFGLDIENSEDNKSTLSLQFVDSAADMPLAKMHDAFSTNVVASKELQQPGSARSTRHLEIELPKEASYQEGDHLGVIPRYYEGIVNRVTQRFGLSASQLIRLWAEEEKLAHLPLAKTVSVEELLQYVELQDPVTRTQLRAMAAKTVCPPHKVELEALLGKQAYKEQVLAKRLTMLELLEKYPACEMSFSEFIALLPSIRPRYYSISSSPRVDLKQASITVSVVSGPAWSGYGEYKGIASNYLAELQEGDTITCFISTPQSEFTLPKDPETPLIMVGPGTGVAPFRGFVQARKQLKEQGQSLGEAHLYFGCRSPHEDYLYQEELENAQSEGIILLHTAFSRMPNQPKTYVQHVMEQDGKKLIELLDQGAHFYICGDGIQMAPAVEATLMKSYADVHQVSEADARLWLQQLEEKGRYAKDVWLG

SEQ ID NO: 1341 - DNA, 3147 bp, synthetic construct
  misc_feature 1..3147: note = variant of P450 oxidase from Bacillus megaterium
  source 1..3147: mol_type = other DNA
atgacaattaaggaaatgcctcagcctaagacgtttggagaacttaaaaatttaccgttattaaatacagataaaccggttcaagctttgatgcgtattgcggatgaattaggagaaatctttaaattcgaggcgcctggtagcgtaacgcgctatttatcaagtcagcgtctaattaaagaagcatgcgatgaatcacgctttgataaaaacttaagtcaagggcttaaatttgcacgtgattttgttggagacgggctggttacaagctggacgcatgaaccgaattggaaaaaagcgcataatatcttagttccaagctttagtcagcgcgcaatggggcgttatcatgcgatgatggtcgatatcgccgtgcagcttgttcaaaagtgggggcgtctaaatgcagatgagcatattgaagtatcggaagacatgacacgtttaacgcttgatacaattggtctttgcctgtttaactatcgctttaacagcttttaccgagatacgcctcatccatttattgtgagtgtggttcgtgcactggatgaagtaatgaacaagctgcagcgagcaaatccagacgacccagcttatgatgaaaacaagcgccagtgtcaagaagatatcaaggtgatgaacgactatgtagataaaattattgcagatcgcaaaaacaggggtgaacaaagtcatgatttattaacccagatgctaaacggaaaagatccagaaacgggtgagccgcttgatgacgggaatattcgtcagcaaattattacattcttaattgcgggacaccaaacgacaagtggtcttttatcatttgcgctgtatttcttagtgaaaaatccacgtgtattacaaaaggtagcagaagaagcagcacgagttctagtagatcctgttccaagctacaaacaagtcaaacagcttaaatatgttggcatggtcttaaacgaagcgctgcgcttatggccagtagcgcctatgttttccctatatgcaaaagaagatacggtgcttggaggagaatatcctttaacgaaaggcgacgaagtaatggttctggtgcctcagcttcaccgtgataaaatcatttggggagacgatgtggaggagttccgtccagagcgttttgaaaatccaagtgcgattccgcagcatgcgtttaaaccgtttggaaacggtcagcgtgcgtgtatcggtcagcagttcgctcttcatagtgcaacgctggtacttggtatgatgctaaaacactttgactttgaagatcatacaaactacgagctcgtcattaaagaatcgcggacgttaaaacctgaaggctttgtggtaaaagcaaaatcgaaaggcattccgcttggcggtattccttcaccttcgactgaacagggtgctaaaaaagtacgcaaaaaggcagaaaacgctcataatacgccgctgcttgtgctatacggttcaaatgcgggaacagctgaaggaacggcgcgtgatttagcagatattgcaatgagcaaaggatttgcaccgcaggtcgcaacgcttgattcacacgccggtaatcttccgcgcgaaggagctgtattaattgtaacggcgtcttataacggtcatccgcctgataacgcaaagcaatttgtcgattggttagaccaagcgtctgcggatgaagtaaaaggcgttcgctactccgtatttggatgcggcgataaaaattgggcggggacgtatcaaaaagtgcctgcttttatcgatgaaacgcttgccgctaaaggggcagaaaacatcgctaagcgcggtgaagcagatgcaagcgacgactttgaaggcgcgtatgaagaatggcgtgatcatatgtggagtgacgtagcagcctactttggtctcgacattgaaaacagtgaagataataaatctactctttcacttcaatttgtcgacagcgcggcggatatgcctcttgcgaaaatgcacgatgcgttttcaacgaacgtcgtagcaagcaaagaacttcaacagcctggcagtgcacgaagcacgcgacatcttgaaattgaacttccaaaagaagcttcttatcaagaaggagatcatttaggtgttattcctcgctattatgaaggaatagtaaaccgtgtaacacagaggttccagctaagcgcatcacagctgatccgtctggaagcagaagaagaaaaattagctcatttgccactcgctaaaacagtatccgtagaagagcttctgcaatacgtggagcttcaagatcctgttacgcgcacgcagcttcgcgcaatggctgctaaaacggtctgcccgccgcataaagtagagcttgaagccttgcttggcaagcaagcctataaagaacaggtgctggcaaaacgtttaacaatgcttgaactgcttgaaaaatacccggcgtgtgaaatgagtttcagcgaatttatcgcccttctgccaagcatacgcccgcgctattactcgatttcttcatcacctcgtgtcgatctgaaacaagcaagcatcacggtcagcgttgtcagcggaccggcgtggagcggatatggagaatataaaggaattgcgtcgaactatcttgctgagctgcaagaaggagatacgattacgtgctttatttccacaccgcagtcagagtttacgctgccaaaagaccctgaaacgccgcttatcatggtcggaccgggaacaggcgtcgcgccgtttagaggctttgtgcaggcgcgcaaacagctaaaagaacaaggacagtcacttggagaagcacatttatacttcggctgccgttcacctcatgaagactatctgtatcaagaagagcttgaaaacgcccaaagcgaaggcatcattctgcttcataccgctttttctcgcatgccgaatcagccgaaaacatacgttcagcacgtaatggaacaagacggcaagaaattgattgaacttcttgatcaaggagcgcacttctatatttgcggagacggaattcaaatggcacctgccgttgaagcaacgcttatgaaaagctatgctgacgttcaccaagtgtcggaagcagacgctcgcttatggctgcagcagctagaagaaaaaggccgatacgcaaaagacgtgtggctgggg

SEQ ID NO: 1342 - protein, 1049 aa, synthetic construct
  REGION 1..1049: note = variant of P450 oxidase from Bacillus megaterium
MTIKEMPQPKTFGELKNLPLLNTDKPVQALMRIADELGEIFKFEAPGSVTRYLSSQRLIKEACDESRFDKNLSQGLKFARDFVGDGLVTSWTHEPNWKKAHNILVPSFSQRAMGRYHAMMVDIAVQLVQKWGRLNADEHIEVSEDMTRLTLDTIGLCLFNYRFNSFYRDTPHPFIVSVVRALDEVMNKLQRANPDDPAYDENKRQCQEDIKVMNDYVDKIIADRKNRGEQSHDLLTQMLNGKDPETGEPLDDGNIRQQIITFLIAGHQTTSGLLSFALYFLVKNPRVLQKVAEEAARVLVDPVPSYKQVKQLKYVGMVLNEALRLWPVAPMFSLYAKEDTVLGGEYPLTKGDEVMVLVPQLHRDKIIWGDDVEEFRPERFENPSAIPQHAFKPFGNGQRACIGQQFALHSATLVLGMMLKHFDFEDHTNYELVIKESRTLKPEGFVVKAKSKGIPLGGIPSPSTEQGAKKVRKKAENAHNTPLLVLYGSNAGTAEGTARDLADIAMSKGFAPQVATLDSHAGNLPREGAVLIVTASYNGHPPDNAKQFVDWLDQASADEVKGVRYSVFGCGDKNWAGTYQKVPAFIDETLAAKGAENIAKRGEADASDDFEGAYEEWRDHMWSDVAAYFGLDIENSEDNKSTLSLQFVDSAADMPLAKMHDAFSTNVVASKELQQPGSARSTRHLEIELPKEASYQEGDHLGVIPRYYEGIVNRVTQRFQLSASQLIRLEAEEEKLAHLPLAKTVSVEELLQYVELQDPVTRTQLRAMAAKTVCPPHKVELEALLGKQAYKEQVLAKRLTMLELLEKYPACEMSFSEFIALLPSIRPRYYSISSSPRVDLKQASITVSVVSGPAWSGYGEYKGIASNYLAELQEGDTITCFISTPQSEFTLPKDPETPLIMVGPGTGVAPFRGFVQARKQLKEQGQSLGEAHLYFGCRSPHEDYLYQEELENAQSEGIILLHTAFSRMPNQPKTYVQHVMEQDGKKLIELLDQGAHFYICGDGIQMAPAVEATLMKSYADVHQVSEADARLWLQQLEEKGRYAKDVWLG

SEQ ID NO: 1343 - DNA, 3147 bp, synthetic construct
  misc_feature 1..3147: note = variant of P450 oxidase from Bacillus megaterium
  source 1..3147: mol_type = other DNA
atgacaattaaggaaatgcctcagcctaagacgtttggagaacttaaaaatttaccgttattaaatacagataaaccggttcaagctttgatgcgtattgcggatgaattaggagaaatctttaaattcgaggcgcctggtagcgtaacgcgctatttatcaagtcagcgtctaattaaagaagcatgcgatgaatcacgctttgataaaaacttaagtcaagggcttaaatttgcacgtgattttgttggagacgggctggttacaagctggacgcatgaaccgaattggaaaaaagcgcataatatcttagttccaagctttagtcagcgcgcaatggggcgttatcatgcgatgatggtcgatatcgccgtgcagcttgttcaaaagtgggggcgtctaaatgcagatgagcatattgaagtatcggaagacatgacacgtttaacgcttgatacaattggtctttgcctgtttaactatcgctttaacagcttttaccgagatacgcctcatccatttattgtgagtgtggttcgtgcactggatgaagtaatgaacaagctgcagcgagcaaatccagacgacccagcttatgatgaaaacaagcgccagtgtcaagaagatatcaaggtgatgaacgactatgtagataaaattattgcagatcgcaaaaacaggggtgaacaaagtcatgatttattaacccagatgctaaacggaaaagatccagaaacgggtgagccgcttgatgacgggaatattcgtcagcaaattattacattcttaattgcgggacaccaaacgacaagtggtcttttatcatttgcgctgtatttcttagtgaaaaatccacgtgtattacaaaaggtagcagaagaagcagcacgagttctagtagatcctgttccaagctacaaacaagtcaaacagcttaaatatgttggcatggtcttaaacgaagcgctgcgcttatggccagtagcgcctatgttttccctatatgcaaaagaagatacggtgcttggaggagaatatcctttaacgaaaggcgacgaagtaatggttctggtgcctcagcttcaccgtgataaaatcatttggggagacgatgtggaggagttccgtccagagcgttttgaaaatccaagtgcgattccgcagcatgcgtttaaaccgtttggaaacggtcagcgtgcgtgtatcggtcagcagttcgctcttcatagtgcaacgctggtacttggtatgatgctaaaacactttgactttgaagatcatacaaactacgagctcgtcattaaagaatcgcggacgttaaaacctgaaggctttgtggtaaaagcaaaatcgaaaggcattccgcttggcggtattccttcaccttcgactgaacagggtgctaaaaaagtacgcaaaaaggcagaaaacgctcataatacgccgctgcttgtgctatacggttcaaatgcgggaacagctgaaggaacggcgcgtgatttagcagatattgcaatgagcaaaggatttgcaccgcaggtcgcaacgcttgattcacacgccggtaatcttccgcgcgaaggagctgtattaattgtaacggcgtcttataacggtcatccgcctgataacgcaaagcaatttgtcgattggttagaccaagcgtctgcggatgaagtaaaaggcgttcgctactccgtatttggatgcggcgataaaaattgggcggggacgtatcaaaaagtgcctgcttttatcgatgaaacgcttgccgctaaaggggcagaaaacatcgctaagcgcggtgaagcagatgcaagcgacgactttgaaggcgcgtatgaagaatggcgtgatcatatgtggagtgacgtagcagcctactttggtctcgacattgaaaacagtgaagataataaatctactctttcacttcaatttgtcgacagcgcggcggatatgcctcttgcgaaaatgcacgatgcgttttcaacgaacgtcgtagcaagcaaagaacttcaacagcctggcagtgcacgaagcacgcgacatcttgaaattgaacttccaaaagaagcttcttatcaagaaggagatcatttaggtgttattcctcgctattatgaaggaatagtaaaccgtgtaacacagaggttcggcctaagcgcatcacagctgatccgtctggaagcagaagaagaaaaattagctcatttgccactcgctaaaacagtatccgtagaagagcttctgcaatacgtggagcttcaagatcctgttacgcgcacgcagcttcgcgcaatggctgctaaaacggtctgcccgccgcataaagtagagcttgaagccttgcttggcaagcaagcctataaagaacaggtgctggcaaaacgtttaacaatgcttgaactgcttgaaaaatacccggcgtgtgaaatgagtttcagcggttttatcgcccttctgccaagcatacgcccgcgctattactcgatttcttcatcacctcgtgtcgatctgaaacaagcaagcatcacggtcagcgttgtcagcggaccggcgtggagcggatatggagaatataaaggaattgcgtcgaactatcttgctgagctgcaagaaggagatacgattacgtgctttatttccacaccgcagtcagagtttacgctgccaaaagaccctgaaacgccgcttatcatggtcggaccgggaacaggcgtcgcgccgtttagaggctttgtgcaggcgcgcaaacagctaaaagaacaaggacagtcacttggagaagcacatttatacttcggctgccgttcacctcatgaagactatctgtatcaagaagagcttgaaaacgcccaaagcgaaggcatcattctgcttcataccgctttttctcgcatgccgaatcagccgaaaacatacgttcagcacgtaatggaacaagacggcaagaaattgattgaacttcttgatcaaggagcgcacttctatatttgcggagacggaattcaaatggcacctgccgttgaagcaacgcttatgaaaagctatgctgacgttcaccaagtgtcggaagcagacgctcgcttatggctgcagcagctagaagaaaaaggccgatacgcaaaagacgtgtggctgggg

SEQ ID NO: 1344 - protein, 1049 aa, synthetic construct
  REGION 1..1049: note = variant of P450 oxidase from Bacillus megaterium
MTIKEMPQPKTFGELKNLPLLNTDKPVQALMRIADELGEIFKFEAPGSVTRYLSSQRLIKEACDESRFDKNLSQGLKFARDFVGDGLVTSWTHEPNWKKAHNILVPSFSQRAMGRYHAMMVDIAVQLVQKWGRLNADEHIEVSEDMTRLTLDTIGLCLFNYRFNSFYRDTPHPFIVSVVRALDEVMNKLQRANPDDPAYDENKRQCQEDIKVMNDYVDKIIADRKNRGEQSHDLLTQMLNGKDPETGEPLDDGNIRQQIITFLIAGHQTTSGLLSFALYFLVKNPRVLQKVAEEAARVLVDPVPSYKQVKQLKYVGMVLNEALRLWPVAPMFSLYAKEDTVLGGEYPLTKGDEVMVLVPQLHRDKIIWGDDVEEFRPERFENPSAIPQHAFKPFGNGQRACIGQQFALHSATLVLGMMLKHFDFEDHTNYELVIKESRTLKPEGFVVKAKSKGIPLGGIPSPSTEQGAKKVRKKAENAHNTPLLVLYGSNAGTAEGTARDLADIAMSKGFAPQVATLDSHAGNLPREGAVLIVTASYNGHPPDNAKQFVDWLDQASADEVKGVRYSVFGCGDKNWAGTYQKVPAFIDETLAAKGAENIAKRGEADASDDFEGAYEEWRDHMWSDVAAYFGLDIENSEDNKSTLSLQFVDSAADMPLAKMHDAFSTNVVASKELQQPGSARSTRHLEIELPKEASYQEGDHLGVIPRYYEGIVNRVTQRFGLSASQLIRLEAEEEKLAHLPLAKTVSVEELLQYVELQDPVTRTQLRAMAAKTVCPPHKVELEALLGKQAYKEQVLAKRLTMLELLEKYPACEMSFSGFIALLPSIRPRYYSISSSPRVDLKQASITVSVVSGPAWSGYGEYKGIASNYLAELQEGDTITCFISTPQSEFTLPKDPETPLIMVGPGTGVAPFRGFVQARKQLKEQGQSLGEAHLYFGCRSPHEDYLYQEELENAQSEGIILLHTAFSRMPNQPKTYVQHVMEQDGKKLIELLDQGAHFYICGDGIQMAPAVEATLMKSYADVHQVSEADARLWLQQLEEKGRYAKDVWLG

SEQ ID NO: 1345 - DNA, 3147 bp, synthetic construct
  misc_feature 1..3147: note = variant of P450 oxidase from Bacillus megaterium
  source 1..3147: mol_type = other DNA
atgacaattaaggaaatgcctcagcctaagacgtttggagaacttaaaaatttaccgttattaaatacagataaaccggttcaagctttgatgcgtattgcggatgaattaggagaaatctttaaattcgaggcgcctggtagcgtaacgcgctatttatcaagtcagcgtctaattaaagaagcatgcgatgaatcacgctttgataaaaacttaagtcaagggcttaaatttgcacgtgattttgttggagacgggctggttacaagctggacgcatgaaccgaattggaaaaaagcgcataatatcttagttccaagctttagtcagcgcgcaatggggcgttatcatgcgatgatggtcgatatcgccgtgcagcttgttcaaaagtgggggcgtctaaatgcagatgagcatattgaagtatcggaagacatgacacgtttaacgcttgatacaattggtctttgcctgtttaactatcgctttaacagcttttaccgagatacgcctcatccatttattgtgagtgtggttcgtgcactggatgaagtaatgaacaagctgcagcgagcaaatccagacgacccagcttatgatgaaaacaagcgccagtgtcaagaagatatcaaggtgatgaacgactatgtagataaaattattgcagatcgcaaaaacaggggtgaacaaagtcatgatttattaacccagatgctaaacggaaaagatccagaaacgggtgagccgcttgatgacgggaatattcgtcagcaaattattacattcttaattgcgggacaccaaacgacaagtggtcttttatcatttgcgctgtatttcttagtgaaaaatccacgtgtattacaaaaggtagcagaagaagcagcacgagttctagtagatcctgttccaagctacaaacaagtcaaacagcttaaatatgttggcatggtcttaaacgaagcgctgcgcttatggccagtagcgcctatgttttccctatatgcaaaagaagatacggtgcttggaggagaatatcctttaacgaaaggcgacgaagtaatggttctggtgcctcagcttcaccgtgataaaatcatttggggagacgatgtggaggagttccgtccagagcgttttgaaaatccaagtgcgattccgcagcatgcgtttaaaccgtttggaaacggtcagcgtgcgtgtatcggtcagcagttcgctcttcatagtgcaacgctggtacttggtatgatgctaaaacactttgactttgaagatcatacaaactacgagctcgtcattaaagaatcgcggacgttaaaacctgaaggctttgtggtaaaagcaaaatcgaaaggcattccgcttggcggtattccttcaccttcgactgaacagggtgctaaaaaagtacgcaaaaaggcagaaaacgctcataatacgccgctgcttgtgctatacggttcaaatgcgggaacagctgaaggaacggcgcgtgatttagcagatattgcaatgagcaaaggatttgcaccgcaggtcgcaacgcttgattcacacgccggtaatcttccgcgcgaaggagctgtattaattgtaacggcgtcttataacggtcatccgcctgataacgcaaagcaatttgtcgattggttagaccaagcgtctgcggatgaagtaaaaggcgttcgctactccgtatttggatgcggcgataaaaattgggcggggacgtatcaaaaagtgcctgcttttatcgatgaaacgcttgccgctaaaggggcagaaaacatcgctaagcgcggtgaagcagatgcaagcgacgactttgaaggcgcgtatgaagaatggcgtgatcatatgtggagtgacgtagcagcctactttggtctcgacattgaaaacagtgaagataataaatctactctttcacttcaatttgtcgacagcgcggcggatatgcctcttgcgaaaatgcacgatgcgttttcaacgaacgtcgtagcaagcaaagaacttcaacagcctggcagtgcacgaagcacgcgacatcttgaaattgaacttccaaaagaagcttcttatcaagaaggagatcatttaggtgttattcctcgctattatgaaggaatagtaaaccgtgtaacacagaggttcggcctaagcgcatcacagctgatccgtctggaagcagaagaagaaaaattagctcatttgccactcgctaaaacagtatccgtagaagagcttctgcaatacgtggagcttcaagatcctgttacgcgcacgcagcttcgcgcaatggctgctaaaacggtctgcccgccgcataaagtagagcttgaagccttgcttggcaagcaagcctataaagaacaggtgctggcaaaacgtttaacaatgcttgaactgcttgaaaaatacccggcgtgtgaaatgagtttcagcgaatttatcgcccttctgccaagcatacgcccgcgctattactcgatttcttcatcacctcgtgtcgatctgaaacaagcaagcatcacggtcagcgttgtcagcggaccggcgtggagcggatatggagaatataaaggaattgcgtcgaactatcttgctgagctgcaagaaggagatacgattacgtgctttatttccacaccgcagtcagagtttacgctgccaaaagaccctgaaacgccgcttatcatggtcggaccgggaacaggcgtcgcgccgtttagaggctttgtgcaggcgcgcaaacagctaaaagaacaaggacagtcacttggagaagcacatttatacttcggctgccgttcacctcatgaagactatctgtatcaagaagagcttgaaaacgcccaaagcgaaggcatcattctgcttcataccgctttttctcgcatgccgaatcagccgaaaacatacgttcagcacgtaatggaacaagacggcaagaaattgattgaacttcttgatcaaggaggtcacttctatatttgcggagacggaattcaaatggcacctgccgttgaagcaacgcttatgaaaagctatgctgacgttcaccaagtgtcggaagcagacgctcgcttatggctgcagcagctagaagaaaaaggccgatacgcaaaagacgtgtggctgggg

SEQ ID NO: 1346 - protein, 1049 aa, synthetic construct
  REGION 1..1049: note = variant of P450 oxidase from Bacillus megaterium
MTIKEMPQPKTFGELKNLPLLNTDKPVQALMRIADELGEIFKFEAPGSVTRYLSSQRLIKEACDESRFDKNLSQGLKFARDFVGDGLVTSWTHEPNWKKAHNILVPSFSQRAMGRYHAMMVDIAVQLVQKWGRLNADEHIEVSEDMTRLTLDTIGLCLFNYRFNSFYRDTPHPFIVSVVRALDEVMNKLQRANPDDPAYDENKRQCQEDIKVMNDYVDKIIADRKNRGEQSHDLLTQMLNGKDPETGEPLDDGNIRQQIITFLIAGHQTTSGLLSFALYFLVKNPRVLQKVAEEAARVLVDPVPSYKQVKQLKYVGMVLNEALRLWPVAPMFSLYAKEDTVLGGEYPLTKGDEVMVLVPQLHRDKIIWGDDVEEFRPERFENPSAIPQHAFKPFGNGQRACIGQQFALHSATLVLGMMLKHFDFEDHTNYELVIKESRTLKPEGFVVKAKSKGIPLGGIPSPSTEQGAKKVRKKAENAHNTPLLVLYGSNAGTAEGTARDLADIAMSKGFAPQVATLDSHAGNLPREGAVLIVTASYNGHPPDNAKQFVDWLDQASADEVKGVRYSVFGCGDKNWAGTYQKVPAFIDETLAAKGAENIAKRGEADASDDFEGAYEEWRDHMWSDVAAYFGLDIENSEDNKSTLSLQFVDSAADMPLAKMHDAFSTNVVASKELQQPGSARSTRHLEIELPKEASYQEGDHLGVIPRYYEGIVNRVTQRFGLSASQLIRLEAEEEKLAHLPLAKTVSVEELLQYVELQDPVTRTQLRAMAAKTVCPPHKVELEALLGKQAYKEQVLAKRLTMLELLEKYPACEMSFSEFIALLPSIRPRYYSISSSPRVDLKQASITVSVVSGPAWSGYGEYKGIASNYLAELQEGDTITCFISTPQSEFTLPKDPETPLIMVGPGTGVAPFRGFVQARKQLKEQGQSLGEAHLYFGCRSPHEDYLYQEELENAQSEGIILLHTAFSRMPNQPKTYVQHVMEQDGKKLIELLDQGGHFYICGDGIQMAPAVEATLMKSYADVHQVSEADARLWLQQLEEKGRYAKDVWLG

SEQ ID NO: 1347 - DNA, 3147 bp, synthetic construct
  misc_feature 1..3147: note = variant of P450 oxidase from Bacillus megaterium
  source 1..3147: mol_type = other DNA
atgacaattaaggaaatgcctcagcctaagacgtttggagaacttaaaaatttaccgttattaaatacagataaaccggttcaagctttgatgcgtattgcggatgaattaggagaaatctttaaattcgaggcgcctggtagcgtaacgcgctatttatcaagtcagcgtctaattaaagaagcatgcgatgaatcacgctttgataaaaacttaagtcaagggcttaaatttgcacgtgattttgttggagacgggctggttacaagctggacgcatgaaccgaattggaaaaaagcgcataatatcttagttccaagctttagtcagcgcgcaatggggcgttatcatgcgatgatggtcgatatcgccgtgcagcttgttcaaaagtgggggcgtctaaatgcagatgagcatattgaagtatcggaagacatgacacgtttaacgcttgatacaattggtctttgcctgtttaactatcgctttaacagcttttaccgagatacgcctcatccatttattgtgagtgtggttcgtgcactggatgaagtaatgaacaagctgcagcgagcaaatccagacgacccagcttatgatgaaaacaagcgccagtgtcaagaagatatcaaggtgatgaacgactatgtagataaaattattgcagatcgcaaaaacaggggtgaacaaagtcatgatttattaacccagatgctaaacggaaaagatccagaaacgggtgagccgcttgatgacgggaatattcgtcagcaaattattacattcttaattgcgggacaccaaacgacaagtggtcttttatcatttgcgctgtatttcttagtgaaaaatccacgtgtattacaaaaggtagcagaagaagcagcacgagttctagtagatcctgttccaagctacaaacaagtcaaacagcttaaatatgttggcatggtcttaaacgaagcgctgcgcttatggccagtagcgcctatgttttccctatatgcaaaagaagatacggtgcttggaggagaatatcctttaacgaaaggcgacgaagtaatggttctggtgcctcagcttcaccgtgataaaatcatttggggagacgatgtggaggagttccgtccagagcgttttgaaaatccaagtgcgattccgcagcatgcgtttaaaccgtttggaaacggtcagcgtgcgtgtatcggtcagcagttcgctcttcatagtgcaacgctggtacttggtatgatgctaaaacactttgactttgaagatcatacaaactacgagctcgtcattaaagaatcgcggacgttaaaacctgaaggctttgtggtaaaagcaaaatcgaaaggcattccgcttggcggtattccttcaccttcgactgaacagggtgctaaaaaagtacgcaaaaaggcagaaaacgctcataatacgccgctgcttgtgctatacggttcaaatgcgggaacagctgaaggaacggcgcgtgatttagcagatattgcaatgagcaaaggatttgcaccgcaggtcgcaacgcttgattcacacgccggtaatcttccgcgcgaaggagctgtattaattgtaacggcgtcttataacggtcatccgcctgataacgcaaagcaatttgtcgattggttagaccaagcgtctgcggatgaagtaaaaggcgttcgctactccgtatttggatgcggcgataaaaattgggcggggacgtatcaaaaagtgcctgcttttatcgatgaaacgcttgccgctaaaggggcagaaaacatcgctaagcgcggtgaagcagatgcaagcgacgactttgaaggcgcgtatgaagaatggcgtgatcatatgtggagtgacgtagcagcctactttggtctcgacattgaaaacagtgaagataataaatctactctttcacttcaatttgtcgacagcgcggcggatatgcctcttgcgaaaatgcacgatgcgttttcaacgaacgtcgtagcaagcaaagaacttcaacagcctggcagtgcacgaagcacgcgacatcttgaaattgaacttccaaaagaagcttcttatcaagaaggagatcatttaggtgttattcctcgctattatgaaggaatagtaaaccgtgtaacacagaggttcggcctaagcgcatcacagctgatccgtctggaagcagaagaagaaaaattagctcatttgccactcgctaaaacagtatccgtagaagagcttctgcaatacgtggagcttcaagatcctgttacgcgcacgcagcttcgcgcaatggctgctaaaacggtctgcccgccgcataaagtagagcttgaagccttgcttggcaagcaagcctataaagaacaggtgctggcaaaacgtttaacaatgcttgaactgcttgaaaaatacccggcgtgtgaaatgagtttcagcgaatttatcgcccttctgccaagcatacgcccgcgctattactcgatttcttcatcacctcgtgtcgatctgaaacaagcaagcatcacggtcagcgttgtcagcggaccggcgtggagcggatatggagaatataaaggaattgcgtcgaactatcttgctgagctgcaagaaggagatacgattacgtgctttatttccacaccgcagtcagagtttacgctgccaaaagaccctgaaacgccgcttatcatggtcggaccgggaacaggcgtcgcgccgtttagaggctttgtgcaggcgcgcaaacagctaaaaaggcaaggacagtcacttggagaagcacatttatacttcggctgccgttcacctcatgaagactatctgtatcaagaagagcttgaaaacgcccaaagcgaaggcatcattctgcttcataccgctttttctcgcatgccgaatcagccgaaaacatacgttcagcacgtaatggaacaagacggcaagaaattgattgaacttcttgatcaaggagcgcacttctatatttgcggagacggaattcaaatggcacctgccgttgaagcaacgcttatgaaaagctatgctgacgttcaccaagtgtcggaagcagacgctcgcttatggctgcagcagctagaagaaaaaggccgatacgcaaaagacgtgtggctgggg

SEQ ID NO: 1348 - protein, 1049 aa, synthetic construct
  REGION 1..1049: note = variant of P450 oxidase from Bacillus megaterium
MTIKEMPQPKTFGELKNLPLLNTDKPVQALMRIADELGEIFKFEAPGSVTRYLSSQRLIKEACDESRFDKNLSQGLKFARDFVGDGLVTSWTHEPNWKKAHNILVPSFSQRAMGRYHAMMVDIAVQLVQKWGRLNADEHIEVSEDMTRLTLDTIGLCLFNYRFNSFYRDTPHPFIVSVVRALDEVMNKLQRANPDDPAYDENKRQCQEDIKVMNDYVDKIIADRKNRGEQSHDLLTQMLNGKDPETGEPLDDGNIRQQIITFLIAGHQTTSGLLSFALYFLVKNPRVLQKVAEEAARVLVDPVPSYKQVKQLKYVGMVLNEALRLWPVAPMFSLYAKEDTVLGGEYPLTKGDEVMVLVPQLHRDKIIWGDDVEEFRPERFENPSAIPQHAFKPFGNGQRACIGQQFALHSATLVLGMMLKHFDFEDHTNYELVIKESRTLKPEGFVVKAKSKGIPLGGIPSPSTEQGAKKVRKKAENAHNTPLLVLYGSNAGTAEGTARDLADIAMSKGFAPQVATLDSHAGNLPREGAVLIVTASYNGHPPDNAKQFVDWLDQASADEVKGVRYSVFGCGDKNWAGTYQKVPAFIDETLAAKGAENIAKRGEADASDDFEGAYEEWRDHMWSDVAAYFGLDIENSEDNKSTLSLQFVDSAADMPLAKMHDAFSTNVVASKELQQPGSARSTRHLEIELPKEASYQEGDHLGVIPRYYEGIVNRVTQRFGLSASQLIRLEAEEEKLAHLPLAKTVSVEELLQYVELQDPVTRTQLRAMAAKTVCPPHKVELEALLGKQAYKEQVLAKRLTMLELLEKYPACEMSFSEFIALLPSIRPRYYSISSSPRVDLKQASITVSVVSGPAWSGYGEYKGIASNYLAELQEGDTITCFISTPQSEFTLPKDPETPLIMVGPGTGVAPFRGFVQARKQLKRQGQSLGEAHLYFGCRSPHEDYLYQEELENAQSEGIILLHTAFSRMPNQPKTYVQHVMEQDGKKLIELLDQGAHFYICGDGIQMAPAVEATLMKSYADVHQVSEADARLWLQQLEEKGRYAKDVWLG

SEQ ID NO: 1349 - DNA, 3147 bp, synthetic construct
  misc_feature 1..3147: note = variant of P450 oxidase from Bacillus megaterium
  source 1..3147: mol_type = other DNA
atgacaattaaggaaatgcctcagcctaagacgtttggagaacttaaaaatttaccgttattaaatacagataaaccggttcaagctttgatgcgtattgcggatgaattaggagaaatctttaaattcgaggcgcctggtagcgtaacgcgctatttatcaagtcagcgtctaattaaagaagcatgcgatgaatcacgctttgataaaaacttaagtcaagggcttaaatttgcacgtgattttgttggagacgggctggttacaagctggacgcatgaaccgaattggaaaaaagcgcataatatcttagttccaagctttagtcagcgcgcaatggggcgttatcatgcgatgatggtcgatatcgccgtgcagcttgttcaaaagtgggggcgtctaaatgcagatgagcatattgaagtatcggaagacatgacacgtttaacgcttgatacaattggtctttgcctgtttaactatcgctttaacagcttttaccgagatacgcctcatccatttattgtgagtgtggttcgtgcactggatgaagtaatgaacaagctgcagcgagcaaatccagacgacccagcttatgatgaaaacaagcgccagtgtcaagaagatatcaaggtgatgaacgactatgtagataaaattattgcagatcgcaaaaacaggggtgaacaaagtcatgatttattaacccagatgctaaacggaaaagatccagaaacgggtgagccgcttgatgacgggaatattcgtcagcaaattattacattcttaattgcgggacaccaaacgacaagtggtcttttatcatttgcgctgtatttcttagtgaaaaatccacgtgtattacaaaaggtagcagaagaagcagcacgagttctagtagatcctgttccaagctacaaacaagtcaaacagcttaaatatgttggcatggtcttaaacgaagcgctgcgcttatggccagtagcgcctatgttttccctatatgcaaaagaagatacggtgcttggaggagaatatcctttaacgaaaggcgacgaagtaatggttctggtgcctcagcttcaccgtgataaaatcatttggggagacgatgtggaggagttccgtccagagcgttttgaaaatccaagtgcgattccgcagcatgcgtttaaaccgtttggaaacggtcagcgtgcgtgtatcggtcagcagttcgctcttcatagtgcaacgctggtacttggtatgatgctaaaacactttgactttgaagatcatacaaactacgagctcgtcattaaagaatcgcggacgttaaaacctgaaggctttgtggtaaaagcaaaatcgaaaggcattccgcttggcggtattccttcaccttcgactgaacagggtgctaaaaaagtacgcaaaaaggcagaaaacgctcataatacgccgctgcttgtgctatacggttcaaatgcgggaacagctgaaggaacggcgcgtgatttagcagatattgcaatgagcaaaggatttgcaccgcaggtcgcaacgcttgattcacacgccggtaatcttccgcgcgaaggagctgtattaattgtaacggcgtcttataacggtcatccgcctgataacgcaaagcaatttgtcgattggttagaccaagcgtctgcggatgaagtaaagggcgttcgctactccgtatttggatgcggcgataaaaattgggcggggacgtatcaaaaagtgcctgcttttatcgatgaaacgcttgccgctaaaggggcagaaaacatcgctaagcgcggtgaagcagatgcaagcgacgactttgaaggcgcgtatgaagaatggcgtgatcatatgtggagtgacgtagcagcctactttggtctcgacattgaaaacagtgaagataataaatctactctttcacttcaatttgtcgacagcgcggcggatatgcctcttgcgaaaatgcacgatgcgttttcaacgaacgtcgtagcaagcaaagaacttcaacagcctggcagtgcacgaagcacgcgacatcttgaaattgaagggccaaaagaagcttcttatcaagaaggagatcatttaggtgttattcctcgctattatgaaggaatagtaaaccgtgtaacacagaggttcggcctaagcgcatcacagctgatccgtctggaagcagaagaagaaaaattagctcatttgccactcgctaaaacagtatccgtagaagagcttctgcaatacgtggagcttcaagatcctgttacgcgcacgcagcttcgcgcaatggctgctaaaacggtctgcccgccgcataaagtagagcttgaagccttgcttggcaagcaagcctataaagaacaggtgctggcaaaacgtttaacaatgcttgaactgcttgaaaaatacccggcgtgtgaaatgagtttcagcgaatttatcgcccttctgccaagcatacgcccgcgctattactcgatttcttcatcacctcgtgtcgatctgaaacaagcaagcatcacggtcagcgttgtcagcggaccggcgtggagcggatatggagaatataaaggaattgcgtcgaactatcttgctgagctgcaagaaggagatacgattacgtgctttatttccacaccgcagtcagagtttacgctgccaaaagaccctgaaacgccgcttatcatggtcggaccgggaacaggcgtcgcgccgtttagaggctttgtgcaggcgcgcaaacagctaaaagaacaaggacagtcacttggagaagcacatttatacttcggctgccgttcacctcatgaagactatctgtatcaagaagagcttgaaaacgcccaaagcgaaggcatcattctgcttcataccgctttttctcgcatgccgaatcagccgaaaacatacgttcagcacgtaatggaacaagacggcaagaaattgattgaacttcttgatcaaggagcgcacttctatatttgcggagacggaattcaaatggcacctgccgttgaagcaacgcttatgaaaagctatgctgacgttcaccaagtgtcggaagcagacgctcgcttatggctgcagcagctagaagaaaaaggccgatacgcaaaagacgtgtggctgggg

SEQ ID NO: 1350 - protein, 1049 aa, synthetic construct
  REGION 1..1049: note = variant of P450 oxidase from Bacillus megaterium
MTIKEMPQPKTFGELKNLPLLNTDKPVQALMRIADELGEIFKFEAPGSVTRYLSSQRLIKEACDESRFDKNLSQGLKFARDFVGDGLVTSWTHEPNWKKAHNILVPSFSQRAMGRYHAMMVDIAVQLVQKWGRLNADEHIEVSEDMTRLTLDTIGLCLFNYRFNSFYRDTPHPFIVSVVRALDEVMNKLQRANPDDPAYDENKRQCQEDIKVMNDYVDKIIADRKNRGEQSHDLLTQMLNGKDPETGEPLDDGNIRQQIITFLIAGHQTTSGLLSFALYFLVKNPRVLQKVAEEAARVLVDPVPSYKQVKQLKYVGMVLNEALRLWPVAPMFSLYAKEDTVLGGEYPLTKGDEVMVLVPQLHRDKIIWGDDVEEFRPERFENPSAIPQHAFKPFGNGQRACIGQQFALHSATLVLGMMLKHFDFEDHTNYELVIKESRTLKPEGFVVKAKSKGIPLGGIPSPSTEQGAKKVRKKAENAHNTPLLVLYGSNAGTAEGTARDLADIAMSKGFAPQVATLDSHAGNLPREGAVLIVTASYNGHPPDNAKQFVDWLDQASADEVKGVRYSVFGCGDKNWAGTYQKVPAFIDETLAAKGAENIAKRGEADASDDFEGAYEEWRDHMWSDVAAYFGLDIENSEDNKSTLSLQFVDSAADMPLAKMHDAFSTNVVASKELQQPGSARSTRHLEIEGPKEASYQEGDHLGVIPRYYEGIVNRVTQRFGLSASQLIRLEAEEEKLAHLPLAKTVSVEELLQYVELQDPVTRTQLRAMAAKTVCPPHKVELEALLGKQAYKEQVLAKRLTMLELLEKYPACEMSFSEFIALLPSIRPRYYSISSSPRVDLKQASITVSVVSGPAWSGYGEYKGIASNYLAELQEGDTITCFISTPQSEFTLPKDPETPLIMVGPGTGVAPFRGFVQARKQLKEQGQSLGEAHLYFGCRSPHEDYLYQEELENAQSEGIILLHTAFSRMPNQPKTYVQHVMEQDGKKLIELLDQGAHFYICGDGIQMAPAVEATLMKSYADVHQVSEADARLWLQQLEEKGRYAKDVWLG

SEQ ID NO: 1351 - DNA, 3147 bp, synthetic construct
  misc_feature 1..3147: note = variant of P450 oxidase from Bacillus megaterium
  source 1..3147: mol_type = other DNA
atgacaattaaggaaatgcctcagcctaagacgtttggagaacttaaaaatttaccgttattaaatacagataaaccggttcaagctttgatgcgtattgcggatgaattaggagaaatctttaaattcgaggcgcctggtagcgtaacgcgctatttatcaagtcagcgtctaattaaagaagcatgcgatgaatcacgctttgataaaaacttaagtcaagggcttaaatttgcacgtgattttgttggagacgggctggttacaagctggacgcatgaaccgaattggaaaaaagcgcataatatcttagttccaagctttagtcagcgcgcaatggggcgttatcatgcgatgatggtcgatatcgccgtgcagcttgttcaaaagtgggggcgtctaaatgcagatgagcatattgaagtatcggaagacatgacacgtttaacgcttgatacaattggtctttgcctgtttaactatcgctttaacagcttttaccgagatacgcctcatccatttattgtgagtgtggttcgtgcactggatgaagtaatgaacaagctgcagcgagcaaatccagacgacccagcttatgatgaaaacaagcgccagtgtcaagaagatatcaaggtgatgaacgactatgtagataaaattattgcagatcgcaaaaacaggggtgaacaaagtcatgatttattaacccagatgctaaacggaaaagatccagaaacgggtgagccgcttgatgacgggaatattcgtcagcaaattattacattcttaattgcgggacaccaaacgacaagtggtcttttatcatttgcgctgtatttcttagtgaaaaatccacgtgtattacaaaaggtagcagaagaagcagcacgagttctagtagatcctgttccaagctacaaacaagtcaaacagcttaaatatgttggcatggtcttaaacgaagcgctgcgcttatggccagtagcgcctatgttttccctatatgcaaaagaagatacggtgcttggaggagaatatcctttaacgaaaggcgacgaagtaatggttctggtgcctcagcttcaccgtgataaaatcatttggggagacgatgtggaggagttccgtccagagcgttttgaaaatccaagtgcgattccgcagcatgcgtttaaaccgtttggaaacggtcagcgtgcgtgtatcggtcagcagttcgctcttcatagtgcaacgctggtacttggtatgatgctaaaacactttgactttgaagatcatacaaactacgagctcgtcattaaagaatcgcggacgttaaaacctgaaggctttgtggtaaaagcaaaatcgaaaggcattccgcttggcggtattccttcaccttcgactgaacagggtgctaaaaaagtacgcaaaaaggcagaaaacgctcataatacgccgctgcttgtgctatacggttcaaatgcgggaacagctgaaggaacggcgcgtgatttagcagatattgcaatgagcaaaggatttgcaccgcaggtcgcaacgcttgattcacacgccggtaatcttccgcgcgaaggagctgtattaattgtaacggcgtcttataacggtcatccgcctgataacgcaaagcaatttgtcgattggttagaccaagcgtctgcggatgaagtaaaaggcgttcgctactccgtatttggatgcggcgataaaaattgggcggggacgtatcaaaaagtgcctgcttttatcgatgaaacgcttgccgctaaaggggcagaaaacatcgctaagcgcggtgaagcagatgcaagcgacgactttgaaggcgcgtatgaagaatggcgtgatcatatgtggagtgacgtagcagcctactttggtctcgacattgaaaacagtgaagataataaatctactctttcacttcaatttgtcgacagcgcggcggatatgcctcttgcgaaaatgcacgatgcgttttcaacgaacgtcgtagcaagcaaagaacttcaacagcctggcagtgcacgaagcacgcgacatcttgaaattgaacttccaaaagaagcttcttatcaagaaggagatcatttaggtgttattcctcgctattatgaaggaatagtaaaccgtgtaacacagaggttcggcctaagcgcatcacagctgatccgtctggaagcagaagaagaaaaattagctcatttgccactcgctaaaacagtatccgtagaagagcttctgcaatacgtggagcttcaagatcctgttacgcgcacgcagcttcgcgcaatggctgctaaaacggtctgcccgccgcataaagtagagcttgaagccttgcttggcaagcaagcctataaagaacaggtgctggcaaaacgtttaacaatgcttgaactgcttgaaaaatacccggcgtgtgaaatgagtttcagcgaatttatcgcccttctgccaagcatacgcccgcgctattactcgatttcttcatcacctcgtgtcgatctgaaacaagcaagcatcacggtcagcgttgtcagcggaccggcgtggagcggatatggagaatataaaggaattgcgtcgaactatcttgctgagctgcaagaaggagatacgattacgtgctttatttccacaccgcagtcagagtttacgctgccaaaagaccctgaaacgccgcttatcatggtcggaccgggaacaggcgtcgcgccgtttagaggctttgtgcaggcgcgcaaacagctaaaagaacaaggacagtcacttggagaagcacatttatacttcggctgccgttcacctcatgaagactatctgtatcaagaagagcttgaaaacgcccaaagcgaaggcatcattctgcttcataccgctttttctcgcatgccgaatcagccgaaaacatacgttcagcacgtaatggaacaagacggcaagaaattgattgaacttcttgatcaaggagcgcacttctatatttgcggagacggaattcaaatggcacctgccgttgaagcaacgcttatgaaaagctatgctgacgttcaccaagtgtcggaagcagacgctcgcttatggctgcagcagctagaagaaaaagatcgatacgcaaaagacgtgtggctgggg

SEQ ID NO: 1352 - protein, 1049 aa, synthetic construct
  REGION 1..1049: note = variant of P450 oxidase from Bacillus megaterium
MTIKEMPQPKTFGELKNLPLLNTDKPVQALMRIADELGEIFKFEAPGSVTRYLSSQRLIKEACDESRFDKNLSQGLKFARDFVGDGLVTSWTHEPNWKKAHNILVPSFSQRAMGRYHAMMVDIAVQLVQKWGRLNADEHIEVSEDMTRLTLDTIGLCLFNYRFNSFYRDTPHPFIVSVVRALDEVMNKLQRANPDDPAYDENKRQCQEDIKVMNDYVDKIIADRKNRGEQSHDLLTQMLNGKDPETGEPLDDGNIRQQIITFLIAGHQTTSGLLSFALYFLVKNPRVLQKVAEEAARVLVDPVPSYKQVKQLKYVGMVLNEALRLWPVAPMFSLYAKEDTVLGGEYPLTKGDEVMVLVPQLHRDKIIWGDDVEEFRPERFENPSAIPQHAFKPFGNGQRACIGQQFALHSATLVLGMMLKHFDFEDHTNYELVIKESRTLKPEGFVVKAKSKGIPLGGIPSPSTEQGAKKVRKKAENAHNTPLLVLYGSNAGTAEGTARDLADIAMSKGFAPQVATLDSHAGNLPREGAVLIVTASYNGHPPDNAKQFVDWLDQASADEVKGVRYSVFGCGDKNWAGTYQKVPAFIDETLAAKGAENIAKRGEADASDDFEGAYEEWRDHMWSDVAAYFGLDIENSEDNKSTLSLQFVDSAADMPLAKMHDAFSTNVVASKELQQPGSARSTRHLEIELPKEASYQEGDHLGVIPRYYEGIVNRVTQRFGLSASQLIRLEAEEEKLAHLPLAKTVSVEELLQYVELQDPVTRTQLRAMAAKTVCPPHKVELEALLGKQAYKEQVLAKRLTMLELLEKYPACEMSFSEFIALLPSIRPRYYSISSSPRVDLKQASITVSVVSGPAWSGYGEYKGIASNYLAELQEGDTITCFISTPQSEFTLPKDPETPLIMVGPGTGVAPFRGFVQARKQLKEQGQSLGEAHLYFGCRSPHEDYLYQEELENAQSEGIILLHTAFSRMPNQPKTYVQHVMEQDGKKLIELLDQGAHFYICGDGIQMAPAVEATLMKSYADVHQVSEADARLWLQQLEEKDRYAKDVWLG

SEQ ID NO: 1353 - DNA, 3147 bp, synthetic construct
  misc_feature 1..3147: note = variant of P450 oxidase from Bacillus megaterium
  source 1..3147: mol_type = other DNA
atgacaattaaggaaatgcctcagcctaagacgtttggagaacttaaaaatttaccgttattaaatacagataaaccggttcaagctttgatgcgtattgcggatgaattaggagaaatctttaaattcgaggcgcctggtagcgtaacgcgctatttatcaagtcagcgtctaattaaagaagcatgcgatgaatcacgctttgataaaaacttaagtcaagggcttaaatttgcacgtgattttgttggagacgggctggttacaagctggacgcatgaaccgaattggaaaaaagcgcataatatcttagttccaagctttagtcagcgcgcaatggggcgttatcatgcgatgatggtcgatatcgccgtgcagcttgttcaaaagtgggggcgtctaaatgcagatgagcatattgaagtatcggaagacatgacacgtttaacgcttgatacaattggtctttgcctgtttaactatcgctttaacagcttttaccgagatacgcctcatccatttattgtgagtgtggttcgtgcactggatgaagtaatgaacaagctgcagcgagcaaatccagacgacccagcttatgatgaaaacaagcgccagtgtcaagaagatatcaaggtgatgaacgactatgtagataaaattattgcagatcgcaaaaacaggggtgaacaaagtcatgatttattaacccagatgctaaacggaaaagatccagaaacgggtgagccgcttgatgacgggaatattcgtcagcaaattattacattcttaattgcgggacaccaaacgacaagtggtcttttatcatttgcgctgtatttcttagtgaaaaatccacgtgtattacaaaaggtagcagaagaagcagcacgagttctagtagatcctgttccaagctacaaacaagtcaaacagcttaaatatgttggcatggtcttaaacgaagcgctgcgcttatggccagtagcgcctatgttttccctatatgcaaaagaagatacggtgcttggaggagaatatcctttaacgaaaggcgacgaagtaatggttctggtgcctcagcttcaccgtgataaaatcatttggggagacgatgtggaggagttccgtccagagcgttttgaaaatccaagtgcgattccgcagcatgcgtttaaaccgtttggaaacggtcagcgtgcgtgtatcggtcagcagttcgctcttcatagtgcaacgctggtacttggtatgatgctaaaacactttgactttgaagatcatacaaactacgagctcgtcattaaagaatcgcggacgttaaaacctgaaggctttgtggtaaaagcaaaatcgaaaggcattccgcttggcggtattccttcaccttcgactgaacagggtgctaaaaaagtacgcaaaaaggcagaaaacgctcataatacgccgctgcttgtgctatacggttcaaatgcgggaacagctgaaggaacggcgcgtgatttagcagatattgcaatgagcaaaggatttgcaccgcaggtcgcaacgcttgattcacacgccggtaatcttccgcgcgaaggagctgtattaattgtaacggcgtcttataacggtcatccgcctgataacgcaaagcaatttgtcgattggttagaccaagcgtctgcggatgaagtaaaaggcgttcgctactccgtatttggatgcggcgataaaaattgggcggggacgtatcaaaaagtgcctgcttttatcgatgaaacgcttgccgctaaaggggcagaaaacatcgctaagcgcggtgaagcagatgcaagcgacgactttgaaggcgcgtatgaagaatggcgtgatcatatgtggagtgacgtagcagcctactttggtctcgacattgaaaacagtgaagataataaatctactctttcacttcaatttgtcgacagcgcggcggatatgcctcttgcgaaaatgcacgatgcgttttcaacgaacgtcgtagcaagcaaagaacttcaacagcctggcagtgcacgaagcacgcgacatcttgaaattgaacttccaaaagaagcttcttatcaagaaggagatcatttaggtgttattcctcgctattatgaaggaatagtaaaccgtgtaacacagaggttcggcctaagcgcatcacagctgatccgtctggaagcagaagaagaaaaattagctcatttgccactcgctaaaacagtatccgtagaagagcttctgcaatacgtggagcttcaagatcctgttacgcgcacgcagcttcgcgcaatggctgctaaaacggtctgcccgccgcataaagtagagcttgaagccttgcttggcaagcaagcctataaagaacaggtgctggcaaaacgtttaacaatgcttgaactgcttgaaaaatacccggcgtgtgaaatgagtttcagcgaatttatcgcccttctgccaagcatacgcccgcgctattactcgatttcttcatcacctcgtgtcgatctgaaacaagcaagcatcacggtcagcgttgtcagcggaccggcgtggagcggatatggagaatataaaggaattgcgtcgaactatcttgctgagctgcaagaaggagatacgattacgtgctttatttccacaccgcagtcagagtttacgctgccaaaagaccctgaaacgccgcttatcatggtcggaccgggaacaggcgtcgcgccgtttagaggctttgtgcaggcgcgcaaacagctaaaagaacaaggacagtcacttggagaagcacatttatacttcggctgccgttcacctcatgaagactatctgtatcaagaagagcttgaaaacgcccaaagcgaaggcatcattctgcttcataccgctttttctcgcatgccgaatcagccgaaaacatacgttcagcaccagatggaacaagacggcaagaaattgattgaacttcttgatcaaggagcgcacttctatatttgcggagacggaattcaaatggcacctgccgttgaagcaacgcttatgaaaagctatgctgacgttcaccaagtgtcggaagcagacgctcgcttatggctgcagcagctagaagaaaaaggccgatacgcaaaagacgtgtggctgggg

SEQ ID NO: 1354 - protein, 1049 aa, synthetic construct
  REGION 1..1049: note = variant of P450 oxidase from Bacillus megaterium
MTIKEMPQPKTFGELKNLPLLNTDKPVQALMRIADELGEIFKFEAPGSVTRYLSSQRLIKEACDESRFDKNLSQGLKFARDFVGDGLVTSWTHEPNWKKAHNILVPSFSQRAMGRYHAMMVDIAVQLVQKWGRLNADEHIEVSEDMTRLTLDTIGLCLFNYRFNSFYRDTPHPFIVSVVRALDEVMNKLQRANPDDPAYDENKRQCQEDIKVMNDYVDKIIADRKNRGEQSHDLLTQMLNGKDPETGEPLDDGNIRQQIITFLIAGHQTTSGLLSFALYFLVKNPRVLQKVAEEAARVLVDPVPSYKQVKQLKYVGMVLNEALRLWPVAPMFSLYAKEDTVLGGEYPLTKGDEVMVLVPQLHRDKIIWGDDVEEFRPERFENPSAIPQHAFKPFGNGQRACIGQQFALHSATLVLGMMLKHFDFEDHTNYELVIKESRTLKPEGFVVKAKSKGIPLGGIPSPSTEQGAKKVRKKAENAHNTPLLVLYGSNAGTAEGTARDLADIAMSKGFAPQVATLDSHAGNLPREGAVLIVTASYNGHPPDNAKQFVDWLDQASADEVKGVRYSVFGCGDKNWAGTYQKVPAFIDETLAAKGAENIAKRGEADASDDFEGAYEEWRDHMWSDVAAYFGLDIENSEDNKSTLSLQFVDSAADMPLAKMHDAFSTNVVASKELQQPGSARSTRHLEIELPKEASYQEGDHLGVIPRYYEGIVNRVTQRFGLSASQLIRLEAEEEKLAHLPLAKTVSVEELLQYVELQDPVTRTQLRAMAAKTVCPPHKVELEALLGKQAYKEQVLAKRLTMLELLEKYPACEMSFSEFIALLPSIRPRYYSISSSPRVDLKQASITVSVVSGPAWSGYGEYKGIASNYLAELQEGDTITCFISTPQSEFTLPKDPETPLIMVGPGTGVAPFRGFVQARKQLKEQGQSLGEAHLYFGCRSPHEDYLYQEELENAQSEGIILLHTAFSRMPNQPKTYVQHQMEQDGKKLIELLDQGAHFYICGDGIQMAPAVEATLMKSYADVHQVSEADARLWLQQLEEKGRYAKDVWLG

SEQ ID NO: 1355 - DNA, 3147 bp, synthetic construct
  misc_feature 1..3147: note = variant of P450 oxidase from Bacillus megaterium
  source 1..3147: mol_type = other DNA
atgacaattaaggaaatgcctcagcctaagacgtttggagaacttaaaaatttaccgttattaaatacagataaaccggttcaagctttgatgcgtattgcggatgaattaggagaaatctttaaattcgaggcgcctggtagcgtaacgcgctatttatcaagtcagcgtctaattaaagaagcatgcgatgaatcacgctttgataaaaacttaagtcaagggcttaaatttgcacgtgattttgttggagacgggctggttacaagctggacgcatgaaccgaattggaaaaaagcgcataatatcttagttccaagctttagtcagcgcgcaatggggcgttatcatgcgatgatggtcgatatcgccgtgcagcttgttcaaaagtgggggcgtctaaatgcagatgagcatattgaagtatcggaagacatgacacgtttaacgcttgatacaattggtctttgcctgtttaactatcgctttaacagcttttaccgagatacgcctcatccatttattgtgagtgtggttcgtgcactggatgaagtaatgaacaagctgcagcgagcaaatccagacgacccagcttatgatgaaaacaagcgccagtgtcaagaagatatcaaggtgatgaacgactatgtagataaaattattgcagatcgcaaaaacaggggtgaacaaagtcatgatttattaacccagatgctaaacggaaaagatccagaaacgggtgagccgcttgatgacgggaatattcgtcagcaaattattacattcttaattgcgggacaccaaacgacaagtggtcttttatcatttgcgctgtatttcttagtgaaaaatccacgtgtattacaaaaggtagcagaagaagcagcacgagttctagtagatcctgttccaagctacaaacaagtcaaacagcttaaatatgttggcatggtcttaaacgaagcgctgcgcttatggccagtagcgcctatgttttccctatatgcaaaagaagatacggtgcttggaggagaatatcctttaacgaaaggcgacgaagtaatggttctggtgcctcagcttcaccgtgataaaatcatttggggagacgatgtggaggagttccgtccagagcgttttgaaaatccaagtgcgattccgcagcatgcgtttaaaccgtttggaaacggtcagcgtgcgtgtatcggtcagcagttcgctcttcatagtgcaacgctggtacttggtatgatgctaaaacactttgactttgaagatcatacaaactacgagctcgtcattaaagaatcgcggacgttaaaacctgaaggctttgtggtaaaagcaaaatcgaaaggcattccgcttggcggtattccttcaccttcgactgaacagggtgctaaaaaagtacgcaaaaaggcagaaaacgctcataatacgccgctgcttgtgctatacggttcaaatgcgggaacagctgaaggaacggcgcgtgatttagcagatattgcaatgagcaaaggatttgcaccgcaggtcgcaacgcttgattcacacgccggtaatcttccgcgcgaaggagctgtattaattgtaacggcgtcttataacggtcatccgcctgataacgcaaagcaatttgtcgattggttagaccaagcgtctgcggatgaagtaaaaggcgttcgctactccgtatttggatgcggcgataaaaattgggcggggacgtatcaaaaagtgcctgcttttatcgatgaaacgcttgccgctaaaggggcagaaaacatcgctaagcgcggtgaagcagatgcaagcgacgactttgaaggcgcgtatgaagaatggcgtgatcatatgtggagtgacgtagcagcctactttggtctcgacattgaaaacagtgaagataataaatctactctttcacttcaatttgtcgacagcgcggcggatatgcctcttgcgaaaatgcacgatgcgttttcaacgaacgtcgtagcaagcaaagaacttcaacagcctggcagtgcacgaagcacgcgacatcttgaaattgaacttccaaaagaagcttcttatcaagaaggagatcatttaggtgttattcctcgctattatgaaggaatagtaaaccgtgtaacacagaggttcggcctaagcgcatcacagctgatccgtctggaagcagaagaagaaaaattagctcatttgccactcgctaaaacagtatccgtagaagagcttctgcaatacgtggagcttcaagatcctgttacgcgcacgcagcttcgcgcaatggctgctaaaacggtctgcccgccgcataaagtagagcttgaagccttgcttggcaagcaagcctataaagaacaggtgctggcaaaacgtttaacaatgcttgaactgcttgaaaaatacccggcgtgtgaaatgagtttcagcgaatttatcgcccttctgccaagcatacgcccgcgctattactcgatttcttcatcacctcgtgtcgatctgaaacaagcaagcatcacggtcagcgttgtcagcggaccggcgtggagcggatatggagaatataaaggaattgcgtcgaactatcttgctgagctgcaagaaggagatacgattacgtgctttatttccacaccgcagtcagagtttacgctgccaaaagaccctgaaacgccgcttatcatggtcggaccgggaacaggcgtcgcgccgtttagaggctttgtgcaggcgcgcaaacagctaaaagaacaaggacagtcacttggagaagcacatttatacttcggctgccgttcacctcatgaagactatctgtatcaagaagagcttgaaaacgcccaaagcgaaggcatcattctgcttcataccgctttttctcgcatgccgaatcagccgaaaacatacgttcagcacgtaatggaacaagacggcaagaaattgattgaacttcttgatcaaggagcgcacttctatatttgcggagacggaattcaatctgcacctgccgttgaagcaacgcttatgaaaagctatgctgacgttcaccaagtgtcggaagcagacgctcgcttatggctgcagcagctagaagaaaaaggccgatacgcaaaagacgtgtggctgggg

SEQ ID NO: 1356 - protein, 1049 aa, synthetic construct
  REGION 1..1049: note = variant of P450 oxidase from Bacillus megaterium
MTIKEMPQPKTFGELKNLPLLNTDKPVQALMRIADELGEIFKFEAPGSVTRYLSSQRLIKEACDESRFDKNLSQGLKFARDFVGDGLVTSWTHEPNWKKAHNILVPSFSQRAMGRYHAMMVDIAVQLVQKWGRLNADEHIEVSEDMTRLTLDTIGLCLFNYRFNSFYRDTPHPFIVSVVRALDEVMNKLQRANPDDPAYDENKRQCQEDIKVMNDYVDKIIADRKNRGEQSHDLLTQMLNGKDPETGEPLDDGNIRQQIITFLIAGHQTTSGLLSFALYFLVKNPRVLQKVAEEAARVLVDPVPSYKQVKQLKYVGMVLNEALRLWPVAPMFSLYAKEDTVLGGEYPLTKGDEVMVLVPQLHRDKIIWGDDVEEFRPERFENPSAIPQHAFKPFGNGQRACIGQQFALHSATLVLGMMLKHFDFEDHTNYELVIKESRTLKPEGFVVKAKSKGIPLGGIPSPSTEQGAKKVRKKAENAHNTPLLVLYGSNAGTAEGTARDLADIAMSKGFAPQVATLDSHAGNLPREGAVLIVTASYNGHPPDNAKQFVDWLDQASADEVKGVRYSVFGCGDKNWAGTYQKVPAFIDETLAAKGAENIAKRGEADASDDFEGAYEEWRDHMWSDVAAYFGLDIENSEDNKSTLSLQFVDSAADMPLAKMHDAFSTNVVASKELQQPGSARSTRHLEIELPKEASYQEGDHLGVIPRYYEGIVNRVTQRFGLSASQLIRLEAEEEKLAHLPLAKTVSVEELLQYVELQDPVTRTQLRAMAAKTVCPPHKVELEALLGKQAYKEQVLAKRLTMLELLEKYPACEMSFSEFIALLPSIRPRYYSISSSPRVDLKQASITVSVVSGPAWSGYGEYKGIASNYLAELQEGDTITCFISTPQSEFTLPKDPETPLIMVGPGTGVAPFRGFVQARKQLKEQGQSLGEAHLYFGCRSPHEDYLYQEELENAQSEGIILLHTAFSRMPNQPKTYVQHVMEQDGKKLIELLDQGAHFYICGDGIQSAPAVEATLMKSYADVHQVSEADARLWLQQLEEKGRYAKDVWLG

SEQ ID NO: 1357 - DNA, 3147 bp, synthetic construct
  misc_feature 1..3147: note = variant of P450 oxidase from Bacillus megaterium
  source 1..3147: mol_type = other DNA
atgacaattaaggaaatgcctcagcctaagacgtttggagaacttaaaaatttaccgttattaaatacagataaaccggttcaagctttgatgcgtattgcggatgaattaggagaaatctttaaattcgaggcgcctggtagcgtaacgcgctatttatcaagtcagcgtctaattaaagaagcatgcgatgaatcacgctttgataaaaacttaagtcaagggcttaaatttgcacgtgattttgttggagacgggctggttacaagctggacgcatgaaccgaattggaaaaaagcgcataatatcttagttccaagctttagtcagcgcgcaatggggcgttatcatgcgatgatggtcgatatcgccgtgcagcttgttcaaaagtgggggcgtctaaatgcagatgagcatattgaagtatcggaagacatgacacgtttaacgcttgatacaattggtctttgcctgtttaactatcgctttaacagcttttaccgagatacgcctcatccatttattgtgagtgtggttcgtgcactggatgaagtaatgaacaagctgcagcgagcaaatccagacgacccagcttatgatgaaaacaagcgccagtgtcaagaagatatcaaggtgatgaacgactatgtagataaaattattgcagatcgcaaaaacaggggtgaacaaagtcatgatttattaacccagatgctaaacggaaaagatccagaaacgggtgagccgcttgatgacgggaatattcgtcagcaaattattacattcttaattgcgggacaccaaacgacaagtggtcttttatcatttgcgctgtatttcttagtgaaaaatccacgtgtattacaaaaggtagcagaagaagcagcacgagttctagtagatcctgttccaagctacaaacaagtcaaacagcttaaatatgttggcatggtcttaaacgaagcgctgcgcttatggccagtagcgcctatgttttccctatatgcaaaagaagatacggtgcttggaggagaatatcctttaacgaaaggcgacgaagtaatggttctggtgcctcagcttcaccgtgataaaatcatttggggagacgatgtggaggagttccgtccagagcgttttgaaaatccaagtgcgattccgcagcatgcgtttaaaccgtttggaaacggtcagcgtgcgtgtatcggtcagcagttcgctcttcatagtgcaacgctggtacttggtatgatgctaaaacactttgactttgaagatcatacaaactacgagctcgtcattaaagaatcgcggacgttaaaacctgaaggctttgtggtaaaagcaaaatcgaaaggcattccgcttggcggtattccttcaccttcgactgaacagggtgctaaaaaagtacgcaaaaaggcagaaaacgctcataatacgccgctgcttgtgctatacggttcaaatgcgggaacagctgaaggaacggcgcgtgatttagcagatattgcaatgagcaaaggatttgcaccgcaggtcgcaacgcttggtagtcacgccggtaatcttccgcgcgaaggagctgtattaattgtaacggcgtcttataacggtcatccgcctgataacgcaaagcaatttgtcgattggttagaccaagcgtctgcggatgaagtaaaaggcgtgcgctactccgtatttggatgcggcgataaaaattgggcggggacgtatcaaaaagtgcctgcttttattgatgaaacgcttgccgctaaaggggcagaaaacatcgctaagcgcggtgaagcagatgcaagcgacgactttgaaggcgcgtatgaagaatggcgtgatcatatgtggagtgacgtagcagcctactttggtctcgacattgaaaacagtgaagataataaatctactctttcacttcaatttgtcgacagcgcggcggccatgcctcttgcgaaaatgcacgatgcgttttcaacgaacgtcgtagcaagcaaagaacttcaacagcctggcagtgcacgaagcacgcgacatcttgaaattgaacttccaaaagaagcttcttatcaagaaggagatcatttaggtgttattcctcgctattatgaaggaatagtaaaccgtgtaacacagaggttcggcctaagcgcatcacagctgatccgtctggaagcagaagaagaaaaattagctcatttgccactcgctaaaacagtatccgtagaagagcttctgcaatacgtggagcttcaagatcctgttacgcgcacgcagcttcgcgcaatggctgctaaaacggtctgcccgccgcataaagtagagcttgaagccttgcttggcaagcaagcctataaagaacaggtgctggcaaaacgtttaacaatgcttgaactgcttgaaaaatacccggcgtgtgaaatgagtttcagcgaatttatcgcccttctgccaagcatacgcccgcgctattactcgatttcttcatcacctcgtgtcgatctgaaacaagcaagcatcacggtcagcgttgtcagcggaccggcgtggagcggatatggagaatataaaggaattgcgtcgaactatcttgctgagctgcaagaaggagatacgattacgtgctttatttccacaccgcagtcagagtttacgctgccaaaagaccctgaaacgccgcttatcatggtcggaccgggaacaggcgtcgcgccgtttagaggctttgtgcaggcgcgcaaacagctaaaagaacaaggacagtcacttggagaagcacatttatacttcggctgccgttcacctcatgaagactatctgtatcaagaagagcttgaaaacgcccaaagcgaaggcatcattctgcttcataccgctttttctcgcatgccgaatcagccgaaaacatacgttcagcacgtaatggaacaagacggcaagaaattgattgaacttcttgatcaaggagcgcacttctatatttgcggagacggaattcaaatggcacctgccgttgaagcaacgcttatgaaaagctatgctgacgttcaccaagtgtcggaagcagacgctcgcttatggctgcagcagctagaagaaaaaggccgatacgcaaaagacgtgtggctgggg

SEQ ID NO: 1358 - protein, 1049 aa, synthetic construct
  REGION 1..1049: note = variant of P450 oxidase from Bacillus megaterium
MTIKEMPQPKTFGELKNLPLLNTDKPVQALMRIADELGEIFKFEAPGSVTRYLSSQRLIKEACDESRFDKNLSQGLKFARDFVGDGLVTSWTHEPNWKKAHNILVPSFSQRAMGRYHAMMVDIAVQLVQKWGRLNADEHIEVSEDMTRLTLDTIGLCLFNYRFNSFYRDTPHPFIVSVVRALDEVMNKLQRANPDDPAYDENKRQCQEDIKVMNDYVDKIIADRKNRGEQSHDLLTQMLNGKDPETGEPLDDGNIRQQIITFLIAGHQTTSGLLSFALYFLVKNPRVLQKVAEEAARVLVDPVPSYKQVKQLKYVGMVLNEALRLWPVAPMFSLYAKEDTVLGGEYPLTKGDEVMVLVPQLHRDKIIWGDDVEEFRPERFENPSAIPQHAFKPFGNGQRACIGQQFALHSATLVLGMMLKHFDFEDHTNYELVIKESRTLKPEGFVVKAKSKGIPLGGIPSPSTEQGAKKVRKKAENAHNTPLLVLYGSNAGTAEGTARDLADIAMSKGFAPQVATLGSHAGNLPREGAVLIVTASYNGHPPDNAKQFVDWLDQASADEVKGVRYSVFGCGDKNWAGTYQKVPAFIDETLAAKGAENIAKRGEADASDDFEGAYEEWRDHMWSDVAAYFGLDIENSEDNKSTLSLQFVDSAAAMPLAKMHDAFSTNVVASKELQQPGSARSTRHLEIELPKEASYQEGDHLGVIPRYYEGIVNRVTQRFGLSASQLIRLEAEEEKLAHLPLAKTVSVEELLQYVELQDPVTRTQLRAMAAKTVCPPHKVELEALLGKQAYKEQVLAKRLTMLELLEKYPACEMSFSEFIALLPSIRPRYYSISSSPRVDLKQASITVSVVSGPAWSGYGEYKGIASNYLAELQEGDTITCFISTPQSEFTLPKDPETPLIMVGPGTGVAPFRGFVQARKQLKEQGQSLGEAHLYFGCRSPHEDYLYQEELENAQSEGIILLHTAFSRMPNQPKTYVQHVMEQDGKKLIELLDQGAHFYICGDGIQMAPAVEATLMKSYADVHQVSEADARLWLQQLEEKGRYAKDVWLG

SEQ ID NO: 1359 - DNA, 3147 bp, synthetic construct
  misc_feature 1..3147: note = variant of P450 oxidase from Bacillus megaterium
  source 1..3147: mol_type = other DNA
atgacaattaaggaaatgcctcagcctaagacgtttggagaacttaaaaatttaccgttattaaatacagataaaccggttcaagctttgatgcgtattgcggatgaattaggagaaatctttaaattcgaggcgcctggtagcgtaacgcgctatttatcaagtcagcgtctaattaaagaagcatgcgatgaatcacgctttgataaaaacttaagtcaagggcttaaatttgcacgtgattttgttggagacgggctggttacaagctggacgcatgaaccgaattggaaaaaagcgcataatatcttagttccaagctttagtcagcgcgcaatggggcgttatcatgcgatgatggtcgatatcgccgtgcagcttgttcaaaagtgggggcgtctaaatgcagatgagcatattgaagtatcggaagacatgacacgtttaacgcttgatacaattggtctttgcctgtttaactatcgctttaacagcttttaccgagatacgcctcatccatttattgtgagtgtggttcgtgcactggatgaagtaatgaacaagctgcagcgagcaaatccagacgacccagcttatgatgaaaacaagcgccagtgtcaagaagatatcaaggtgatgaacgactatgtagataaaattattgcagatcgcaaaaacaggggtgaacaaagtcatgatttattaacccagatgctaaacggaaaagatccagaaacgggtgagccgcttgatgacgggaatattcgtcagcaaattattacattcttaattgcgggacaccaaacgacaagtggtcttttatcatttgcgctgtatttcttagtgaaaaatccacgtgtattacaaaaggtagcagaagaagcagcacgagttctagtagatcctgttccaagctacaaacaagtcaaacagcttaaatatgttggcatggtcttaaacgaagcgctgcgcttatggccagtagcgcctatgttttccctatatgcaaaagaagatacggtgcttggaggagaatatcctttaacgaaaggcgacgaagtaatggttctggtgcctcagcttcaccgtgataaaatcatttggggagacgatgtggaggagttccgtccagagcgttttgaaaatccaagtgcgattccgcagcatgcgtttaaaccgtttggaaacggtcagcgtgcgtgtatcggtcagcagttcgctcttcatagtgcaacgctggtacttggtatgatgctaaaacactttgactttgaagatcatacaaactacgagctcgtcattaaagaatcgcggacgttaaaacctgaaggctttgtggtaaaagcaaaatcgaaaggcattccgcttggcggtattccttcaccttcgactgaacagggtgctaaaaaagtacgcaaaaaggcagaaaacgctcataatacgccgctgcttgtgctatacggttcaaatgcgggaacagctgaaggaacggcgcgtgatttagcagatattgcaatgagcaaaggatttgcaccgcaggtcgcaacgcttggtagtcacgccggtaatcttccgcgcgaaggagctgtattaattgtaacggcgtcttataacggtcatccgcctgataacgcaaagcaatttgtcgattggttagaccaagcgtctgcggatgaagtaaaaggcgtgcgctactccgtatttggatgcggcgataaaaattgggcggggacgtatcaaaaagtgcctgcttttattgatgaaacgcttgccgctaaaggggcagaaaacatcgctaagcgcggtgaagcagatgcaagcgacgactttgaaggcgcgtatgaagaatggcgtgatcatatgtggagtgacgtagcagcctactttggtctcgacattgaaaacagtgaagataataaatctactctttcacttcaatttgtcgacagcgcggcgcgtatgcctcttgcgaaaatgcacgatgcgttttcaacgaacgtcgtagcaagcaaagaacttcaacagcctggcagtgcacgaagcacgcgacatcttgaaattgaacttccaaaagaagcttcttatcaagaaggagatcatttaggtgttattcctcgctattatgaaggaatagtaaaccgtgtaacacagaggttcggcctaagcgcatcacagctgatccgtctggaagcagaagaagaaaaattagctcatttgccactcgctaaaacagtatccgtagaagagcttctgcaatacgtggagcttcaagatcctgttacgcgcacgcagcttcgcgcaatggctgctaaaacggtctgcccgccgcataaagtagagcttgaagccttgcttggcaagcaagcctataaagaacaggtgctggcaaaacgtttaacaatgcttgaactgcttgaaaaatacccggcgtgtgaaatgagtttcagcgaatttatcgcccttctgccaagcatacgcccgcgctattactcgatttcttcatcacctcgtgtcgatctgaaacaagcaagcatcacggtcagcgttgtcagcggaccggcgtggagcggatatggagaatataaaggaattgcgtcgaactatcttgctgagctgcaagaaggagatacgattacgtgctttatttccacaccgcagtcagagtttacgctgccaaaagaccctgaaacgccgcttatcatggtcggaccgggaacaggcgtcgcgccgtttagaggctttgtgcaggcgcgcaaacagctaaaagaacaaggacagtcacttggagaagcacatttatacttcggctgccgttcacctcatgaagactatctgtatcaagaagagcttgaaaacgcccaaagcgaaggcatcattctgcttcataccgctttttctcgcatgccgaatcagccgaaaacatacgttcagcacgtaatggaacaagacggcaagaaattgattgaacttcttgatcaaggagcgcacttctatatttgcggagacggaattcaaatggcacctgccgttgaagcaacgcttatgaaaagctatgctgacgttcaccaagtgtcggaagcagacgctcgcttatggctgcagcagctagaagaaaaaggccgatacgcaaaagacgtgtggctgggg

SEQ ID NO: 1360 - protein, 1049 aa, synthetic construct
  REGION 1..1049: note = variant of P450 oxidase from Bacillus megaterium
MTIKEMPQPKTFGELKNLPLLNTDKPVQALMRIADELGEIFKFEAPGSVTRYLSSQRLIKEACDESRFDKNLSQGLKFARDFVGDGLVTSWTHEPNWKKAHNILVPSFSQRAMGRYHAMMVDIAVQLVQKWGRLNADEHIEVSEDMTRLTLDTIGLCLFNYRFNSFYRDTPHPFIVSVVRALDEVMNKLQRANPDDPAYDENKRQCQEDIKVMNDYVDKIIADRKNRGEQSHDLLTQMLNGKDPETGEPLDDGNIRQQIITFLIAGHQTTSGLLSFALYFLVKNPRVLQKVAEEAARVLVDPVPSYKQVKQLKYVGMVLNEALRLWPVAPMFSLYAKEDTVLGGEYPLTKGDEVMVLVPQLHRDKIIWGDDVEEFRPERFENPSAIPQHAFKPFGNGQRACIGQQFALHSATLVLGMMLKHFDFEDHTNYELVIKESRTLKPEGFVVKAKSKGIPLGGIPSPSTEQGAKKVRKKAENAHNTPLLVLYGSNAGTAEGTARDLADIAMSKGFAPQVATLGSHAGNLPREGAVLIVTASYNGHPPDNAKQFVDWLDQASADEVKGVRYSVFGCGDKNWAGTYQKVPAFIDETLAAKGAENIAKRGEADASDDFEGAYEEWRDHMWSDVAAYFGLDIENSEDNKSTLSLQFVDSAARMPLAKMHDAFSTNVVASKELQQPGSARSTRHLEIELPKEASYQEGDHLGVIPRYYEGIVNRVTQRFGLSASQLIRLEAEEEKLAHLPLAKTVSVEELLQYVELQDPVTRTQLRAMAAKTVCPPHKVELEALLGKQAYKEQVLAKRLTMLELLEKYPACEMSFSEFIALLPSIRPRYYSISSSPRVDLKQASITVSVVSGPAWSGYGEYKGIASNYLAELQEGDTITCFISTPQSEFTLPKDPETPLIMVGPGTGVAPFRGFVQARKQLKEQGQSLGEAHLYFGCRSPHEDYLYQEELENAQSEGIILLHTAFSRMPNQPKTYVQHVMEQDGKKLIELLDQGAHFYICGDGIQMAPAVEATLMKSYADVHQVSEADARLWLQQLEEKGRYAKDVWLG

SEQ ID NO: 1361 - DNA, 3147 bp, synthetic construct
  misc_feature 1..3147: note = variant of P450 oxidase from Bacillus megaterium
  source 1..3147: mol_type = other DNA
atgacaattaaggaaatgcctcagcctaagacgtttggagaacttaaaaatttaccgttattaaatacagataaaccggttcaagctttgatgcgtattgcggatgaattaggagaaatctttaaattcgaggcgcctggtagcgtaacgcgctatttatcaagtcagcgtctaattaaagaagcatgcgatgaatcacgctttgataaaaacttaagtcaagggcttaaatttgcacgtgattttgttggagacgggctggttacaagctggacgcatgaaccgaattggaaaaaagcgcataatatcttagttccaagctttagtcagcgcgcaatggggcgttatcatgcgatgatggtcgatatcgccgtgcagcttgttcaaaagtgggggcgtctaaatgcagatgagcatattgaagtatcggaagacatgacacgtttaacgcttgatacaattggtctttgcctgtttaactatcgctttaacagcttttaccgagatacgcctcatccatttattgtgagtgtggttcgtgcactggatgaagtaatgaacaagctgcagcgagcaaatccagacgacccagcttatgatgaaaacaagcgccagtgtcaagaagatatcaaggtgatgaacgactatgtagataaaattattgcagatcgcaaaaacaggggtgaacaaagtcatgatttattaacccagatgctaaacggaaaagatccagaaacgggtgagccgcttgatgacgggaatattcgtcagcaaattattacattcttaattgcgggacaccaaacgacaagtggtcttttatcatttgcgctgtatttcttagtgaaaaatccacgtgtattacaaaaggtagcagaagaagcagcacgagttctagtagatcctgttccaagctacaaacaagtcaaacagcttaaatatgttggcatggtcttaaacgaagcgctgcgcttatggccagtagcgcctatgttttccctatatgcaaaagaagatacggtgcttggaggagaatatcctttaacgaaaggcgacgaagtaatggttctggtgcctcagcttcaccgtgataaaatcatttggggagacgatgtggaggagttccgtccagagcgttttgaaaatccaagtgcgattccgcagcatgcgtttaaaccgtttggaaacggtcagcgtgcgtgtatcggtcagcagttcgctcttcatagtgcaacgctggtacttggtatgatgctaaaacactttgactttgaagatcatacaaactacgagctcgtcattaaagaatcgcggacgttaaaacctgaaggctttgtggtaaaagcaaaatcgaaaggcattccgcttggcggtattccttcaccttcgactgaacagggtgctaaaaaagtacgcaaaaaggcagaaaacgctcataatacgccgctgcttgtgctatacggttcaaatgcgggaacagctgaaggaacggcgcgtgatttagcagatattgcaatgagcaaaggatttgcaccgcaggtcgcaacgcttgatagtcacgccggtaatcttccgcgcgaaggagctgtattaattgtaacggcgtcttataacggtcatccgcctgataacgcaaagcaatttgtcgattggttagaccaagcgtctgcggatgaagtaaaaggcgttcgctactccgtatttggatgcggcgataaaaattgggcggggacgtatcaaaaagtgcctgcttttatcgatgaaacgcttgccgctaaaggggcagaaaacatcgctaagcgcggtgaagcagatgcaagcgacgactttgaaggcgcgtatgaagaatggcgtgatcatatgtggagtgacgtagcagcctactttggtctcgacattgaaaacagtgaagataataaatctactctttcacttcaatttgtcgacagcgcggcgcgtatgcctcttgcgaaaatgcacgatgcgttttcaacgaacgtcgtagcaagcaaagaacttcaacagcctggcagtgcacgaagcacgcgacatcttgaaattgaacttccaaaagaagcttcttatcaagaaggagatcatttaggtgttattcctcgctattatgaaggaatagtaaaccgtgtaacacagaggttcggcctaagcgcatcacagctgatccgtctggaagcagaagaagaaaaattagctcatttgccactcgctaaaacagtatccgtagaagagcttctgcaatacgtggagcttcaagatcctgttacgcgcacgcagcttcgcgcaatggctgctaaaacggtctgcccgccgcataaagtagagcttgaagccttgcttggcaagcaagcctataaagaacaggtgctggcaaaacgtttaacaatgcttgaactgcttgaaaaatacccggcgtgtgaaatgagtttcagcgaatttatcgcccttctgccaagcatacgcccgcgctattactcgatttcttcatcacctcgtgtcgatctgaaacaagcaagcatcacggtcagcgttgtcagcggaccggcgtggagcggatatggagaatataaaggaattgcgtcgaactatcttgctgagctgcaagaaggagatacgattacgtgctttatttccacaccgcagtcagagtttacgctgccaaaagaccctgaaacgccgcttatcatggtcggaccgggaacaggcgtcgcgccgtttagaggctttgtgcaggcgcgcaaacagctaaaagaacaaggacagtcacttggagaagcacatttatacttcggctgccgttcacctcatgaagactatctgtatcaagaagagcttgaaaacgcccaaagcgaaggcatcattctgcttcataccgctttttctcgcatgccgaatcagccgaaaacatacgttcagcacgtaatggaacaagacggcaagaaattgattgaacttcttgatcaaggagcgcacttctatatttgcggagacggaattcaaatggcacctgccgttgaagcaacgcttatgaaaagctatgctgacgttcaccaagtgtcggaagcagacgctcgcttatggctgcagcagctagaagaaaaaggccgatacgcaaaagacgtgtggctgggg

SEQ ID NO: 1362 - protein, 1049 aa, synthetic construct
  REGION 1..1049: note = variant of P450 oxidase from Bacillus megaterium
MTIKEMPQPKTFGELKNLPLLNTDKPVQALMRIADELGEIFKFEAPGSVTRYLSSQRLIKEACDESRFDKNLSQGLKFARDFVGDGLVTSWTHEPNWKKAHNILVPSFSQRAMGRYHAMMVDIAVQLVQKWGRLNADEHIEVSEDMTRLTLDTIGLCLFNYRFNSFYRDTPHPFIVSVVRALDEVMNKLQRANPDDPAYDENKRQCQEDIKVMNDYVDKIIADRKNRGEQSHDLLTQMLNGKDPETGEPLDDGNIRQQIITFLIAGHQTTSGLLSFALYFLVKNPRVLQKVAEEAARVLVDPVPSYKQVKQLKYVGMVLNEALRLWPVAPMFSLYAKEDTVLGGEYPLTKGDEVMVLVPQLHRDKIIWGDDVEEFRPERFENPSAIPQHAFKPFGNGQRACIGQQFALHSATLVLGMMLKHFDFEDHTNYELVIKESRTLKPEGFVVKAKSKGIPLGGIPSPSTEQGAKKVRKKAENAHNTPLLVLYGSNAGTAEGTARDLADIAMSKGFAPQVATLDSHAGNLPREGAVLIVTASYNGHPPDNAKQFVDWLDQASADEVKGVRYSVFGCGDKNWAGTYQKVPAFIDETLAAKGAENIAKRGEADASDDFEGAYEEWRDHMWSDVAAYFGLDIENSEDNKSTLSLQFVDSAARMPLAKMHDAFSTNVVASKELQQPGSARSTRHLEIELPKEASYQEGDHLGVIPRYYEGIVNRVTQRFGLSASQLIRLEAEEEKLAHLPLAKTVSVEELLQYVELQDPVTRTQLRAMAAKTVCPPHKVELEALLGKQAYKEQVLAKRLTMLELLEKYPACEMSFSEFIALLPSIRPRYYSISSSPRVDLKQASITVSVVSGPAWSGYGEYKGIASNYLAELQEGDTITCFISTPQSEFTLPKDPETPLIMVGPGTGVAPFRGFVQARKQLKEQGQSLGEAHLYFGCRSPHEDYLYQEELENAQSEGIILLHTAFSRMPNQPKTYVQHVMEQDGKKLIELLDQGAHFYICGDGIQMAPAVEATLMKSYADVHQVSEADARLWLQQLEEKGRYAKDVWLG

SEQ ID NO: 1363 - DNA, 3147 bp, synthetic construct
  misc_feature 1..3147: note = variant of P450 oxidase from Bacillus megaterium
  source 1..3147: mol_type = other DNA
atgacaattaaggaaatgcctcagcctaagacgtttggagaacttaaaaatttaccgttattaaatacagataaaccggttcaagctttgatgcgtattgcggatgaattaggagaaatctttaaattcgaggcgcctggtagcgtaacgcgctatttatcaagtcagcgtctaattaaagaagcatgcgatgaatcacgctttgataaaaacttaagtcaagggcttaaatttgcacgtgattttgttggagacgggctggttacaagctggacgcatgaaccgaattggaaaaaagcgcataatatcttagttccaagctttagtcagcgcgcaatggggcgttatcatgcgatgatggtcgatatcgccgtgcagcttgttcaaaagtgggggcgtctaaatgcagatgagcatattgaagtatcggaagacatgacacgtttaacgcttgatacaattggtctttgcctgtttaactatcgctttaacagcttttaccgagatacgcctcatccatttattgtgagtgtggttcgtgcactggatgaagtaatgaacaagctgcagcgagcaaatccagacgacccagcttatgatgaaaacaagcgccagtgtcaagaagatatcaaggtgatgaacgactatgtagataaaattattgcagatcgcaaaaacaggggtgaacaaagtcatgatttattaacccagatgctaaacggaaaagatccagaaacgggtgagccgcttgatgacgggaatattcgtcagcaaattattacattcttaattgcgggacaccaaacgacaagtggtcttttatcatttgcgctgtatttcttagtgaaaaatccacgtgtattacaaaaggtagcagaagaagcagcacgagttctagtagatcctgttccaagctacaaacaagtcaaacagcttaaatatgttggcatggtcttaaacgaagcgctgcgcttatggccagtagcgcctatgttttccctatatgcaaaagaagatacggtgcttggaggagaatatcctttaacgaaaggcgacgaagtaatggttctggtgcctcagcttcaccgtgataaaatcatttggggagacgatgtggaggagttccgtccagagcgttttgaaaatccaagtgcgattccgcagcatgcgtttaaaccgtttggaaacggtcagcgtgcgtgtatcggtcagcagttcgctcttcatagtgcaacgctggtacttggtatgatgctaaaacactttgactttgaagatcatacaaactacgagctcgtcattaaagaatcgcggacgttaaaacctgaaggctttgtggtaaaagcaaaatcgaaaggcattccgcttggcggtattccttcaccttcgactgaacagggtgctaaaaaagtacgcaaaaaggcagaaaacgctcataatacgccgctgcttgtgctatacggttcaaatgcgggaacagctgaaggaacggcgcgtgatttagcagatattgcaatgagcaaaggatttgcaccgcaggtcgcaacgcttgattcacacgccggtaatcttccgcgcgaaggagctgtattaattgtaacggcgtcttataacggtcatccgcctgataacgcaaagcaatttgtcgattggttagaccaagcgtctgcggatgaagtaaaaggcgtgcgctactccgtatttggatgcggcgataaaaattgggcggggacgtatcaaaaagtgcctgcttttattgatgaaacgcttgccgctaaaggggcagaaaacatcgctaagcgcggtgaagcagatgcaagcgacgactttgaaggcgcgtatgaagtatggcgcggccatatgtggtcggacgtagcagcctactttggtctcgacattgaaaacagtgaagataataaatctactctttcacttcaatttgtcgacagcgcggcggacatgcctcttgcgaaaatgcacgatgcgttttcaacgaacgtcgtagcaagcaaagaacttcaacagcctggcagtgcacgaagcacgcgacatcttgaaattgaacttccaaaagaagcttcttatcaagaaggagatcatttaggtgttattcctcgctattatgaaggaatagtaaaccgtgtaacacagaggttcggcctaagcgcatcacagctgatccgtctggaagcagaagaagaaaaattagctcatttgccactcgctaaaacagtatccgtagaagagcttctgcaatacgtggagcttcaagatcctgttacgcgcacgcagcttcgcgcaatggctgctaaaacggtctgcccgccgcataaagtagagcttgaagccttgcttggcaagcaagcctataaagaacaggtgctggcaaaacgtttaacaatgcttgaactgcttgaaaaatacccggcgtgtgaaatgagtttcagcgaatttatcgcccttctgccaagcatacgcccgcgctattactcgatttcttcatcacctcgtgtcgatctgaaacaagcaagcatcacggtcagcgttgtcagcggaccggcgtggagcggatatggagaatataaaggaattgcgtcgaactatcttgctgagctgcaagaaggagatacgattacgtgctttatttccacaccgcagtcagagtttacgctgccaaaagaccctgaaacgccgcttatcatggtcggaccgggaacaggcgtcgcgccgtttagaggctttgtgcaggcgcgcaaacagctaaaagaacaaggacagtcacttggagaagcacatttatacttcggctgccgttcacctcatgaagactatctgtatcaagaagagcttgaaaacgcccaaagcgaaggcatcattctgcttcataccgctttttctcgcatgccgaatcagccgaaaacatacgttcagcacgtaatggaacaagacggcaagaaattgattgaacttcttgatcaaggagcgcacttctatatttgcggagacggaattcaaatggcacctgccgttgaagcaacgcttatgaaaagctatgctgacgttcaccaagtgtcggaagcagacgctcgcttatggctgcagcagctagaagaaaaaggccgatacgcaaaagacgtgtggctgggg

SEQ ID NO: 1364 - protein, 1049 aa, synthetic construct
  REGION 1..1049: note = variant of P450 oxidase from Bacillus megaterium
MTIKEMPQPKTFGELKNLPLLNTDKPVQALMRIADELGEIFKFEAPGSVTRYLSSQRLIKEACDESRFDKNLSQGLKFARDFVGDGLVTSWTHEPNWKKAHNILVPSFSQRAMGRYHAMMVDIAVQLVQKWGRLNADEHIEVSEDMTRLTLDTIGLCLFNYRFNSFYRDTPHPFIVSVVRALDEVMNKLQRANPDDPAYDENKRQCQEDIKVMNDYVDKIIADRKNRGEQSHDLLTQMLNGKDPETGEPLDDGNIRQQIITFLIAGHQTTSGLLSFALYFLVKNPRVLQKVAEEAARVLVDPVPSYKQVKQLKYVGMVLNEALRLWPVAPMFSLYAKEDTVLGGEYPLTKGDEVMVLVPQLHRDKIIWGDDVEEFRPERFENPSAIPQHAFKPFGNGQRACIGQQFALHSATLVLGMMLKHFDFEDHTNYELVIKESRTLKPEGFVVKAKSKGIPLGGIPSPSTEQGAKKVRKKAENAHNTPLLVLYGSNAGTAEGTARDLADIAMSKGFAPQVATLDSHAGNLPREGAVLIVTASYNGHPPDNAKQFVDWLDQASADEVKGVRYSVFGCGDKNWAGTYQKVPAFIDETLAAKGAENIAKRGEADASDDFEGAYEVWRGHMWSDVAAYFGLDIENSEDNKSTLSLQFVDSAADMPLAKMHDAFSTNVVASKELQQPGSARSTRHLEIELPKEASYQEGDHLGVIPRYYEGIVNRVTQRFGLSASQLIRLEAEEEKLAHLPLAKTVSVEELLQYVELQDPVTRTQLRAMAAKTVCPPHKVELEALLGKQAYKEQVLAKRLTMLELLEKYPACEMSFSEFIALLPSIRPRYYSISSSPRVDLKQASITVSVVSGPAWSGYGEYKGIASNYLAELQEGDTITCFISTPQSEFTLPKDPETPLIMVGPGTGVAPFRGFVQARKQLKEQGQSLGEAHLYFGCRSPHEDYLYQEELENAQSEGIILLHTAFSRMPNQPKTYVQHVMEQDGKKLIELLDQGAHFYICGDGIQMAPAVEATLMKSYADVHQVSEADARLWLQQLEEKGRYAKDVWLG

SEQ ID NO: 1365 - DNA, 3147 bp, synthetic construct
  misc_feature 1..3147: note = variant of P450 oxidase from Bacillus megaterium
  source 1..3147: mol_type = other DNA
atgacaattaaggaaatgcctcagcctaagacgtttggagaacttaaaaatttaccgttattaaatacagataaaccggttcaagctttgatgcgtattgcggatgaattaggagaaatctttaaattcgaggcgcctggtagcgtaacgcgctatttatcaagtcagcgtctaattaaagaagcatgcgatgaatcacgctttgataaaaacttaagtcaagggcttaaatttgcacgtgattttgttggagacgggctggttacaagctggacgcatgaaccgaattggaaaaaagcgcataatatcttagttccaagctttagtcagcgcgcaatggggcgttatcatgcgatgatggtcgatatcgccgtgcagcttgttcaaaagtgggggcgtctaaatgcagatgagcatattgaagtatcggaagacatgacacgtttaacgcttgatacaattggtctttgcctgtttaactatcgctttaacagcttttaccgagatacgcctcatccatttattgtgagtgtggttcgtgcactggatgaagtaatgaacaagctgcagcgagcaaatccagacgacccagcttatgatgaaaacaagcgccagtgtcaagaagatatcaaggtgatgaacgactatgtagataaaattattgcagatcgcaaaaacaggggtgaacaaagtcatgatttattaacccagatgctaaacggaaaagatccagaaacgggtgagccgcttgatgacgggaatattcgtcagcaaattattacattcttaattgcgggacaccaaacgacaagtggtcttttatcatttgcgctgtatttcttagtgaaaaatccacgtgtattacaaaaggtagcagaagaagcagcacgagttctagtagatcctgttccaagctacaaacaagtcaaacagcttaaatatgttggcatggtcttaaacgaagcgctgcgcttatggccagtagcgcctatgttttccctatatgcaaaagaagatacggtgcttggaggagaatatcctttaacgaaaggcgacgaagtaatggttctggtgcctcagcttcaccgtgataaaatcatttggggagacgatgtggaggagttccgtccagagcgttttgaaaatccaagtgcgattccgcagcatgcgtttaaaccgtttggaaacggtcagcgtgcgtgtatcggtcagcagttcgctcttcatagtgcaacgctggtacttggtatgatgctaaaacactttgactttgaagatcatacaaactacgagctcgtcattaaagaatcgcggacgttaaaacctgaaggctttgtggtaaaagcaaaatcgaaaggcattccgcttggcgctattccttcaccttcgactgaacagggtgctaaaaaagtacgcaaaaaggcagaaaacgctcataatacgccgctgcttgtgctatacggttcaaatgcgggaacagctgaaggaacggcgcgtgatttagcagatattgcaatgagcaaaggatttgcaccgcaggtcgcaacgcttgattcacacgccggtaatcttccgcgcgaaggagctgtattaattgtaacggcgtcttataacggtcatccgcctgataacgcaaagcaatttgtcgattggttagaccaagcgtctgcggatgaagtaaaaggcgttcgctactccgtatttggatgcggcgataaaaattgggcggggacgtatcaaaaagtgcctgcttttatcgatgaaacgcttgccgctaaaggggcagaaaacatcgctaagcgcggtgaagcagatgcaagcgacgactttgaaggcgcgtatgaagaatggcgtgatcatatgtggagtgacgtagcagcctactttggtctcgacattgaaaacagtgaagataataaatctactctttcacttcaatttgtcgacagcgcggcggatatgcctcttgcgaaaatgcacgatgcgttttcaacgaacgtcgtagcaagcaaagaacttcaacagcctggcagtgcacgaagcacgcgacatcttgaaattgaacttccaaaagaagcttcttatcaagaaggagatcatttaggtgttattcctcgctattatgaaggaatagtaaaccgtgtaacacagaggttcggcctaagcgcatcacagctgatccgtctggaagcagaagaagaaaaattagctcatttgccactcgctaaaacagtatccgtagaagagcttctgcaatacgtggagcttcaagatcctgttacgcgcacgcagcttcgcgcaatggctgctaaaacggtctgcccgccgcataaagtagagcttgaagccttgcttggcaagcaagcctataaagaacaggtgctggcaaaacgtttaacaatgcttgaactgcttgaaaaatacccggcgtgtgaaatgagtttcagcgaatttatcgcccttctgccaagcatacgcccgcgctattactcgatttcttcatcacctcgtgtcgatctgaaacaagcaagcatcacggtcagcgttgtcagcggaccggcgtggagcggatatggagaatataaaggaattgcgtcgaactatcttgctgagctgcaagaaggagatacgattacgtgctttatttccacaccgcagtcagagtttacgctgccaaaagaccctgaaacgccgcttatcatggtcggaccgggaacaggcgtcgcgccgtttagaggctttgtgcaggcgcgcaaacagctaaaagaacaaggacagtcacttggagaagcacatttatacttcggctgccgttcacctcatgaagactatctgtatcaagaagagcttgaaaacgcccaaagcgaaggcatcattctgcttcataccgctttttctcgcatgccgaatcagccgaaaacatacgttcagcacgtaatggaacaagacggcaagaaattgattgaacttcttgatcaaggagcgcacttctatatttgcggagacggaattcaaatggcacctgccgttgaagcaacgcttatgaaaagctatgctgacgttcaccaagtgtcggaagcagacgctcgcttatggctgcagcagctagaagaaaaaggccgatacgcaaaagacgtgtggctgggg

SEQ ID NO: 1366 - protein, 1049 aa, synthetic construct
  REGION 1..1049: note = variant of P450 oxidase from Bacillus megaterium
MTIKEMPQPKTFGELKNLPLLNTDKPVQALMRIADELGEIFKFEAPGSVTRYLSSQRLIKEACDESRFDKNLSQGLKFARDFVGDGLVTSWTHEPNWKKAHNILVPSFSQRAMGRYHAMMVDIAVQLVQKWGRLNADEHIEVSEDMTRLTLDTIGLCLFNYRFNSFYRDTPHPFIVSVVRALDEVMNKLQRANPDDPAYDENKRQCQEDIKVMNDYVDKIIADRKNRGEQSHDLLTQMLNGKDPETGEPLDDGNIRQQIITFLIAGHQTTSGLLSFALYFLVKNPRVLQKVAEEAARVLVDPVPSYKQVKQLKYVGMVLNEALRLWPVAPMFSLYAKEDTVLGGEYPLTKGDEVMVLVPQLHRDKIIWGDDVEEFRPERFENPSAIPQHAFKPFGNGQRACIGQQFALHSATLVLGMMLKHFDFEDHTNYELVIKESRTLKPEGFVVKAKSKGIPLGAIPSPSTEQGAKKVRKKAENAHNTPLLVLYGSNAGTAEGTARDLADIAMSKGFAPQVATLDSHAGNLPREGAVLIVTASYNGHPPDNAKQFVDWLDQASADEVKGVRYSVFGCGDKNWAGTYQKVPAFIDETLAAKGAENIAKRGEADASDDFEGAYEEWRDHMWSDVAAYFGLDIENSEDNKSTLSLQFVDSAADMPLAKMHDAFSTNVVASKELQQPGSARSTRHLEIELPKEASYQEGDHLGVIPRYYEGIVNRVTQRFGLSASQLIRLEAEEEKLAHLPLAKTVSVEELLQYVELQDPVTRTQLRAMAAKTVCPPHKVELEALLGKQAYKEQVLAKRLTMLELLEKYPACEMSFSEFIALLPSIRPRYYSISSSPRVDLKQASITVSVVSGPAWSGYGEYKGIASNYLAELQEGDTITCFISTPQSEFTLPKDPETPLIMVGPGTGVAPFRGFVQARKQLKEQGQSLGEAHLYFGCRSPHEDYLYQEELENAQSEGIILLHTAFSRMPNQPKTYVQHVMEQDGKKLIELLDQGAHFYICGDGIQMAPAVEATLMKSYADVHQVSEADARLWLQQLEEKGRYAKDVWLG

SEQ ID NO: 1367 - DNA, 3147 bp, synthetic construct
  misc_feature 1..3147: note = variant of P450 oxidase from Bacillus megaterium
  source 1..3147: mol_type = other DNA
atgacaattaaggaaatgcctcagcctaagacgtttggagaacttaaaaatttaccgttattaaatacagataaaccggttcaagctttgatgcgtattgcggatgaattaggagaaatctttaaattcgaggcgcctggtagcgtaacgcgctatttatcaagtcagcgtctaattaaagaagcatgcgatgaatcacgctttgataaaaacttaagtcaagggcttaaatttgcacgtgattttgttggagacgggctggttacaagctggacgcatgaaccgaattggaaaaaagcgcataatatcttagttccaagctttagtcagcgcgcaatggggcgttatcatgcgatgatggtcgatatcgccgtgcagcttgttcaaaagtgggggcgtctaaatgcagatgagcatattgaagtatcggaagacatgacacgtttaacgcttgatacaattggtctttgcctgtttaactatcgctttaacagcttttaccgagatacgcctcatccatttattgtgagtgtggttcgtgcactggatgaagtaatgaacaagctgcagcgagcaaatccagacgacccagcttatgatgaaaacaagcgccagtgtcaagaagatatcaaggtgatgaacgactatgtagataaaattattgcagatcgcaaaaacaggggtgaacaaagtcatgatttattaacccagatgctaaacggaaaagatccagaaacgggtgagccgcttgatgacgggaatattcgtcagcaaattattacattcttaattgcgggacaccaaacgacaagtggtcttttatcatttgcgctgtatttcttagtgaaaaatccacgtgtattacaaaaggtagcagaagaagcagcacgagttctagtagatcctgttccaagctacaaacaagtcaaacagcttaaatatgttggcatggtcttaaacgaagcgctgcgcttatggccagtagcgcctatgttttccctatatgcaaaagaagatacggtgcttggaggagaatatcctttaacgaaaggcgacgaagtaatggttctggtgcctcagcttcaccgtgataaaatcatttggggagacgatgtggaggagttccgtccagagcgttttgaaaatccaagtgcgattccgcagcatgcgtttaaaccgtttggaaacggtcagcgtgcgtgtatcggtcagcagttcgctcttcatagtgcaacgctggtacttggtatgatgctaaaacactttgactttgaagatcatacaaactacgagctcgtcattaaagaatcgcggacgttaaaacctgaaggctttgtggtaaaagcaaaatcgaaaggcattccgcttggcggtattccttcaccttcgactgaacagggtgctaaaaaagtacgcaaaaaggcagaaaacgctcataatacgccgctgcttgtgctatacggttcaaatgcgggaacagctgaaggaacggcgcgtgatttagcagatattgcaatgagcaaaggatttgcaccgcaggtcgcaacgcttgatctgcacgccggtaatcttccgcgcgaaggagctgtattaattgtaacggcgtcttataacggtcatccgcctgataacgcaaagcaatttgtcgattggttagaccaagcgtctgcggatgaagtaaaaggcgttcgctactccgtatttggatgcggcgataaaaattgggcggggacgtatcaaaaagtgcctgcttttatcgatgaaacgcttgccgctaaaggggcagaaaacatcgctaagcgcggtgaagcagatgcaagcgacgactttgaaggcgcgtatgaagaatggcgtgatcatatgtggagtgacgtagcagcctcgtttggtctcgacattgaaaacagtgaagataataaatctactctttcacttcaatttgtcgacagcgcggcggacatgcctcttgcgaaaatgcacgatgcgttttcaacgaacgtcgtagcaagcaaagaacttcaacagcctggcagtgcacgaagcacgcgacatcttgaaattgaacttccaaaagaagcttcttatcaagaaggagatcatttaggtgttattcctcgctattatgaaggaatagtaaaccgtgtaacacagaggttcggcctaagcgcatcacagctgatccgtctggaagcagaagaagaaaaattagctcatttgccactcgctaaaacagtatccgtagaagagcttctgcaatacgtggagcttcaagatcctgttacgcgcacgcagcttcgcgcaatggctgctaaaacggtctgcccgccgcataaagtagagcttgaagccttgcttggcaagcaagcctataaagaacaggtgctggcaaaacgtttaacaatgcttgaactgcttgaaaaatacccggcgtgtgaaatgagtttcagcgaatttatcgcccttctgccaagcatacgcccgcgctattactcgatttcttcatcacctcgtgtcgatctgaaacaagcaagcatcacggtcagcgttgtcagcggaccggcgtggagcggatatggagaatataaaggaattgcgtcgaactatcttgctgagctgcaagaaggagatacgattacgtgctttatttccacaccgcagtcagagtttacgctgccaaaagaccctgaaacgccgcttatcatggtcggaccgggaacaggcgtcgcgccgtttagaggctttgtgcaggcgcgcaaacagctaaaagaacaaggacagtcacttggagaagcacatttatacttcggctgccgttcacctcatgaagactatctgtatcaagaagagcttgaaaacgcccaaagcgaaggcatcattctgcttcataccgctttttctcgcatgccgaatcagccgaaaacatacgttcagcacgtaatggaacaagacggcaagaaattgattgaacttcttgatcaaggagcgcacttctatatttgcggagacggaattcaaatggcacctgccgttgaagcaacgcttatgaaaagctatgctgacgttcaccaagtgtcggaagcagacgctcgcttatggctgcagcagctagaagaaaaaggccgatacgcaaaagacgtgtggctgggg

SEQ ID NO: 1368 - protein, 1049 aa, synthetic construct
  REGION 1..1049: note = variant of P450 oxidase from Bacillus megaterium
MTIKEMPQPKTFGELKNLPLLNTDKPVQALMRIADELGEIFKFEAPGSVTRYLSSQRLIKEACDESRFDKNLSQGLKFARDFVGDGLVTSWTHEPNWKKAHNILVPSFSQRAMGRYHAMMVDIAVQLVQKWGRLNADEHIEVSEDMTRLTLDTIGLCLFNYRFNSFYRDTPHPFIVSVVRALDEVMNKLQRANPDDPAYDENKRQCQEDIKVMNDYVDKIIADRKNRGEQSHDLLTQMLNGKDPETGEPLDDGNIRQQIITFLIAGHQTTSGLLSFALYFLVKNPRVLQKVAEEAARVLVDPVPSYKQVKQLKYVGMVLNEALRLWPVAPMFSLYAKEDTVLGGEYPLTKGDEVMVLVPQLHRDKIIWGDDVEEFRPERFENPSAIPQHAFKPFGNGQRACIGQQFALHSATLVLGMMLKHFDFEDHTNYELVIKESRTLKPEGFVVKAKSKGIPLGGIPSPSTEQGAKKVRKKAENAHNTPLLVLYGSNAGTAEGTARDLADIAMSKGFAPQVATLDLHAGNLPREGAVLIVTASYNGHPPDNAKQFVDWLDQASADEVKGVRYSVFGCGDKNWAGTYQKVPAFIDETLAAKGAENIAKRGEADASDDFEGAYEEWRDHMWSDVAASFGLDIENSEDNKSTLSLQFVDSAADMPLAKMHDAFSTNVVASKELQQPGSARSTRHLEIELPKEASYQEGDHLGVIPRYYEGIVNRVTQRFGLSASQLIRLEAEEEKLAHLPLAKTVSVEELLQYVELQDPVTRTQLRAMAAKTVCPPHKVELEALLGKQAYKEQVLAKRLTMLELLEKYPACEMSFSEFIALLPSIRPRYYSISSSPRVDLKQASITVSVVSGPAWSGYGEYKGIASNYLAELQEGDTITCFISTPQSEFTLPKDPETPLIMVGPGTGVAPFRGFVQARKQLKEQGQSLGEAHLYFGCRSPHEDYLYQEELENAQSEGIILLHTAFSRMPNQPKTYVQHVMEQDGKKLIELLDQGAHFYICGDGIQMAPAVEATLMKSYADVHQVSEADARLWLQQLEEKGRYAKDVWLG
